(19) United States
(12) Patent Application Publication
(10) Pub. No.: US 2018/0216090 A1
(43) Pub. Date: Aug. 2, 2018

(54) COMPOSITIONS AND METHODS COMPRISING LG12-CLADE PROTEASE VARIANTS

(71) Applicant: Danisco US Inc., Palo Alto, CA (US)

(72) Inventors: Harm Mulder, Palo Alto, CA (US); Jeffrey Veach Miller, Palo Alto, CA (US); Frits Goedegebuur, Palo Alto, CA (US); David A. Estell, Palo Alto, CA (US); Katherine Augustyn, Palo Alto, CA (US); Lilia Maria Babe, Palo Alto, CA (US); Richard R. Bott, Palo Alto, CA (US); Miles Christopher Scotcher, Palo Alto, CA (US); Jian Yao, Palo Alto, CA (US)

(21) Appl. No.: 15/557,158

(22) PCT Filed: Mar. 14, 2016
(86) PCT No.: PCT/US2016/022282

§ 371 Date: Sep. 11, 2017

Related U.S. Application Data
(60) Provisional application No. 62/131,834, filed on Mar. 12, 2015.

(51) Int. Cl. C12N 9/50; C11D 3/386

(52) U.S. Cl. CPC C12N 9/50; C11D 3/38663; C11D 3/386; C12Y 304/21062

(57) ABSTRACT

The present disclosure provides LG12-clade enzyme variants, compositions comprising these enzyme variants, and method of using these enzymes and compositions, as well as the polynucleotides encoding these enzymes, the vectors comprising these polynucleotides, and the host cells transformed with such vectors.

[0001] Serine proteases are a class of enzymes that cleave peptide bonds in proteins. The serine proteases contain a nucleophilic serine residue at the active site. Subtilisins are a large family of serine proteases, and although they have long been known in the art of industrial enzymes, there remains a need for engineered proteases that are suitable for particular conditions and uses.

[0002] The present disclosure provides, inter alia, LG12-clade protease enzymes, including variant LG12-clade protease enzymes, nucleic acids encoding the same, and compositions and methods related to the production and use thereof.

[0003] In some embodiments, the invention is a composition comprising at least one variant disclosed herein. In some embodiments, the invention is a method of cleaning using a cleaning composition comprising at least one variant disclosed herein.

[0004] Variants, compositions and methods disclosed herein relate to a protease variant, or a recombinant polypeptide or an active fragment thereof generated through conventional molecular biology techniques (see, e.g., Sambrook et al, Molecular Cloning: Cold Spring Harbor Laboratory Press). Some embodiments are directed to a protease variant, or a recombinant polypeptide or an active fragment thereof comprising an amino acid sequence comprising two or more substitutions at one or more positions selected from: (i) 1, 3, 7, 9, 19, 24, 27, 30, 38, 40, 43, 45, 48, 52, 53, 57, 72, 76, 78, 79, 86, 87, 88, 89, 90, 91, 93, 97, 99, 100, 101, 103, 104, 106, 107, 111, 114, 115, 116, 117, 118, 120, 122, 123, 124, 128, 129, 130, 131, 133, 134, 136, 139, 140, 141, 143, 144, 145, 147, 148, 149, 150, 153, 156, 158, 159, 160, 166, 181, 182, 185, 188, 194, 209, 212, 213, 215, 216, 217, 222, 224, 228, 234, 236, 238, 240, 242, 245, 246, 248, 251, 252, 256, 265, 267, 269, 270, 271, 272, 273, and 275; (ii) 1, 3, 9, 19, 24, 27, 30, 38, 40, 43, 45, 48, 52, 53, 57, 72, 76, 78, 79, 86, 87, 88, 89, 90, 91, 93, 97, 99, 100, 101, 103, 104, 106, 107, 111, 114, 115, 116, 117, 118, 120, 122, 123, 124, 128, 129, 130, 131, 133, 134, 136, 139, 140, 141, 143, 144, 145, 147, 148, 149, 150, 153, 156, 158, 159, 160, 166, 181, 182, 185, 188, 194, 209, 212, 213, 215, 216, 217, 222, 224, 228, 234, 236, 238, 240, 242, 245, 246, 248, 251, 252, 256, 265, 267, 271, 272, and 275; (iii) 1, 7, 9, 27, 38, 40, 45, 48, 52, 53, 76, 78, 91, 100, 114, 117, 118, 122, 128, 129, 130, 140, 147, 149, 156, 158, 159, 160, 166, 181, 182, 194, 209, 217, 222, 228, 234, 236, 238, 245, 248, 256, 269, 270, 271, 272, 273, and 275; (iv) 1, 24, 30, 38, 40, 48, 52, 53, 76, 78, 79, 86, 87, 88, 89, 91, 93, 97, 100, 103, 104, 106, 111, 114, 115, 116, 117, 118, 120, 122, 124, 128, 129, 130, 131, 133, 134, 136, 139, 141, 143, 144, 147, 148, 149, 150, 153, 156, 158, 159, 166, 182, 185, 194, 209, 212, 213, 216, 217, 222, 224, 236, 238, 248, 251, 252, 256, 272, and 275; (v) 1, 24, 30, 38, 40, 52, 53, 76, 78, 79, 86, 87, 88, 89, 93, 97, 100, 103, 104, 106, 111, 114, 115, 116, 117, 118, 120, 122, 124, 128, 129, 131, 133, 134, 136, 139, 141, 143, 144, 147, 148, 149, 150, 153, 156, 158, 159, 166, 182, 185, 194, 209, 212, 213, 216, 217, 222, 224, 236, 238, 248, 251, 252, 256, 272, and 275; or (vi) 1, 38, 40, 48, 52, 53, 76, 91, 114, 117, 118, 128, 129, 130, 147, 149, 156, 158, 159, 166, 182, 217, 238, 248, 256, and 272; wherein the amino acid positions of the variant or recombinant polypeptide or active fragment thereof are numbered by correspondence with the amino acid sequence of SEQ ID NO: 10. Another embodiment is directed to a protease variant, or a recombinant polypeptide or an active fragment thereof comprising an amino acid sequence comprising two or more substitutions at one or more position selected from: (i) 52, 53, 76, 86, 97, 103, 104, 106, 111, 114, 115, 116, 118, 120, 122, 124, 128, 129, 130, 131, 134, 136, 139, 141, 143, 144, 147, 148, 150, 156, 158, 159, 166, 217, 248, and 272; (ii) 53, 76, 106, 128, 131, 134, 139, 158, 159, 166, 217, 248, and 272: (iii) 52, 53, 76, 106, 118, 128, 129, 130, 131, 134, 139, 156, 158, 166, 217, 248, and 272; (iv) 52, 53, 76, 128, 118, 156, 158, 166, 217, and 248; (v) 53, 76, 128, 158, 166, and 248; (vi) 52, 53, 76, 118, 128, 156, 158, 166, 217, and 248; or (vii) 52-129, 53-166, 76-166, 166-159, 166-272, 53-76-166, 53-118-166, 53-166-272, 76-118-166, 76-166-248, 76-166-256, and 76-166-272; wherein the amino acid positions of the variant or recombinant polypeptide or active fragment thereof are numbered by correspondence with the amino acid sequence of SEQ ID NO: 10.

[0005] A still further embodiment is directed to a protease variant, or a recombinant polypeptide or an active fragment thereof comprising an amino acid sequence comprising two or more substitutions selected from: (i) A1X, T3X, G7X, P9X, A19X, S24X, K27X, I30X, N38X, A40X, N43X, K45X, A48X, S52X, G53X, A57X, V72X, N76X, T78X, T79X, Y86X, N87X, A88X, D89X, L90X, Y91X, V93X, S97X, S99X, G100X, S110X, T103X, L104X, G106X, I107X, I111X, S114X, I115X, S116X, N117X, G118X, N120X, I122X, N123X, M124X, G128X, S129X, S130X, G131X, T133X, A134X, Q136X, C139X, N140X, N141X, Y143X, N144X, R145X, I147X, V148X, V149X, I150X, A153X, S156X, S158X, S159X, G160X, G166X, S181X, S182X, T185X, S188X, S194X, T209X, N212X, N213X, A215X, S216X, F217X, M222X, A224X, A228X, I234X, A236X, Y238X, S240X, T242X, Q245X, I246X, E248X, K251X, N252X, N256X, K265X, V267X, N269X, V270X, E271X, S272X, A273X, and Q275X; (ii) A1X, T3X, P9X, A19X, S24X, K27X, I30X, N38X, A40X, N43X, K45X, A48X, S52X, G53X, A57X, V72X, N76X, T78X, T79X, Y86X, N87X, A88X, D89X, L90X, Y91X, V93X, S97X, S99X, G100X, S10X, T103X, L04X, G106X, I107X, I111X, S114X, I115X, S116X, N117X, G118X, N120X, I122X, N123X, M124X, G128X, S129X, S130X, G131X, T133X, A134X, Q136X, C139X, N140X, N141X, Y143X, N144X, R145X, I147X, V148X, V149X, I150X, A153X, S156X, S158X, S159X, G160X, G166X, S181X, S182X, T185X, S188X, S194X, T209X, N212X, N213X, A215X, S216X, F217X, M222X, A224X, A228X, I234X, A236X, Y238X, S240X, T242X, Q245X, I246X, E248X, K251X, N252X, N256X, K265X, V267X, E271X, S272X, and Q275X; (iii) A1X, G7X, P9X, K27X, N38X, A40X, K45X, A48X, S52X, G53X, N76X, T78X, Y91X, G160X, S14X, N117X, G118X, I122X, G128X, S129X, S130X, N140X, I147X, V149X, S156X, S158X, S159X, G160X, G166X, S181X, S182X, S194X, T209X, F217X, M222X, A228X, I234X, A236X, Y238X, Q245X, E248X, N256X, N269X, V270X, E271X, S272X, A273X, and Q275X; (iv) A1X, S24X, I30X, N38X, A40X, A48X, S52X, G53X, N76X, T78X, T79X, Y86X, N87X, A88X, D89X, Y91X, V93X, S97X, G100X, T103X, L104X, G106X, I111X, S114X, I115X, S116X, N117X, G118X, N120X, I122X, M124X, G128X, S129X, S130X, G131X, T133X, A134X, Q136X, C139X, N141X, Y143X, N144X, I147X, V148X, V149X, I150X, A153X, S156X, S158X, S159X, G166X, S182X, T185X, S194X, T209X, N212X, N213X, S216X, F217X, M222X, A224X, A236X, Y238X, E248X, K251X, N252X, N256X, S272X, and Q275X; (v) A1X, S24X, I30X, N38X, A40X, S52X, G53X, N76X, T78X, T79X, Y86X, N87X, A88X, D89X, V93X, S97X, G100X, T103X, L104X, G106X, I111X, S114X, I115X, S116X, N117X, G118X, N120X, I122X, M124X, G128X, S129X, G131X, T133X, A134X, Q136X, C139X, N141X, Y143X, N144X, I147X, V148X, V149X, I150X, A153X, S156X, S158X, S159X, G166X, S182X, T185X, S194X, T209X, N212X, N213X, S216X, F217X, M222X, A224X, A236X, Y238X, E248X, K251X, N252X, N256X, S272X, and Q275X; or (vi) A1X, N38X, A40X, A48X, S52X, G53X, N76X, Y91X, S114X, N117X, G118X, G128X, S129X, S130X, I147X, V149X, S156X, S158X, S159X, G166X, S182X, F217X, Y238X, E248X, N256X, and S272X; wherein X is any amino acid and the amino acid positions of the variant or recombinant polypeptide or active fragment thereof are numbered by correspondence with the amino acid sequence of SEQ ID NO: 10. Yet still another embodiment is directed to a protease variant, or a recombinant polypeptide or an active fragment thereof comprising an amino acid sequence comprising two or more substitutions selected from: (i) S52X, G53X, N76X, Y86X, S97X, T103X, L104X, G106X, I111X, S114X, I115X, S116X, G118X, N120X, I122X, M124X, G128X, S129X, S130X, G131X, A134X, Q136X, C139X, N141X, Y143X, N144X, I147X, V148X, I150X, S156X, S158X, S159X, G166X, F217X, E248X, and S272X; (ii) G53X, N76X, G106X, G128X, G131X, A134X, C139X, S158X, S159X, G166X, F217X, E248X, and S272X; (iii) S52X, G53X, N76X, G106X, G118X, G128X, S129X, S130X, G131X, A134X, C139X, S156X, G166X, F217X, E248X, and S272X; (iv) S52X, G53X, N76X, G118X, G128X, S156X, S158X, G166X, F217X, and E248X; (v) G53X, N76X, G128X, S158X, G166X, and E248X; (vi) S52X, G53X, N76X, G118X, G128X, S156X, S158X, G166X, F217X, and E248X; or (vii) S52X-S129X, G53X-G166X, N76X-G166X, G166X-S159X, G166X-S272X, G53X-N76X-G166X, G53X-G118X-G166X, G53X-G166X-S272X, N76X-G118X-G166X, N76X-G166X-E248X, N76X-G166X-N256X, and N76X-G166X-S272X; wherein X is any amino acid and the amino acid positions of the variant or recombinant polypeptide or active fragment thereof are numbered by correspondence with the amino acid sequence of SEQ ID NO: 10.

[0006] An even still further embodiment is directed to a protease variant, or a recombinant polypeptide or an active fragment thereof comprising an amino acid sequence comprising two or more substitutions selected from: (i) X1G, X1T, X3E, X3V, X7C, X9I, X9T, X9V, X19R, X24R, X24T, X27S, X27T, X30V, X38A, X38Q, X38T, X40D, X40E, X40L, X40V, X43D, X43H, X43L, X43S, X45Q, X45R, X48E, X48Q, X52A, X52N, X52Q, X52T, X53D, X53E, X53N, X57P, X72A, X76D, X78A, X78D, X78G, X78S, X79I, X86P, X87S, X88V, X89E, X89S, X90P, X91H, X93T, X97G, X99L, X100A, X100K, X101T, X103E, X103S, X104V, X106S, X107T, X107V, X111L, X114A, X14T, X115G, X116E, X116N, X117E, X117S, X118R, X120H, X122A, X123D, X124L, X128A, X128D, X128E, X128H, X128K, X128M, X128N, X128Q, X128S, X128Y, X129D, X129E, X129G, X129H, X129I, X129K, X129L, X129M, X129N, X129P, X129Q, X129R, X129T, X129V, X129Y, X130A, X130E, X130F, X130G, X130H, X130I, X130L, X130M, X130N, X130Q, X130R, X130T, X130V, X130W, X130Y, X131P, X133A, X133D, X133V, X134T, X136E, X139V, X140D, X140Y, X141S, X143T, X144S, X145N, X145W, X147A, X147V, X148L, X149G, X149L, X149N, X149S, X150V, X153S, X156A, X156H, X156N, X158T, X158V, X159D, X159E, X159N, X159Q, X160D, X166A, X166D, X166H, X166N, X166S, X166Y, X181A, X181N, X182E, X185Q, X188Y, X194P, X209F, X209V, X209Y, X212S, X213T, X215D, X215E, X216T, X217L, X217R, X222L, X224T, X228S, X234V, X236N, X236Q, X238F, X240F, X242S, X245A, X245N, X246V, X248K, X248N, X251R, X251S, X252S, X256E, X256K, X256P, X256R, X256Y, X265S, X267N, X269K, X270C, X271F, X271W, X272K, X272N, X272Q, X273V, X275H, and X275R; (ii) X1G, X1T, X3E, X3V, X9I, X9T, X9V, X19R, X24R, X24T, X27S, X27T, X30V, X38A, X38Q, X38T, X40D, X40E, X40L, X40V, X43D, X43H, X43L, X43S, X45Q, X45R, X48E, X48Q, X52A, X52N, X52Q, X52T, X53D, X53E, X53N, X57P, X72A, X76D, X78A, X78D, X78G, X78S, X79I, X86P, X87S, X88V, X89E, X89S, X90P, X91H, X93T, X97G, X99L, X100A, X100K, X111T, X103E, X103S, X104V, X106S, X107T, X107V, X111L, X114A, X114T, X115G, X116E, X116N, X117E, X117S, X118R, X120H, X122A, X123D, X124L, X128A, X128D, X128E, X128H, X128K, X128M, X128N, X128Q, X128S, X128Y, X129D, X129E, X129G, X129H, X129I, X129K, X129L, X129M, X129N, X129P, X129Q, X129R, X129T, X129V, X129Y, X130A, X130E, X130F, X130G, X130H, X130I, X130L, X130M, X130N, X130Q, X130R, X130T, X130V, X130W, X130Y, X131P, X133A, X133D, X133V, X134T, X136E, X139V, X140D, X140Y, X141S, X143T, X144S, X145N, X145W, X147A, X147V, X148L, X149G, X149L, X149N, X149S, X150V, X153S, X156A, X156H, X156N, X158T, X158V, X159D, X159E, X159N, X159Q, X160D, X166A, X166D, X166H, X166N, X166S, X166Y, X181A, X181N, X182E, X185Q, X188Y, X194P, X209F, X209V, X209Y, X212S, X213T, X215D, X215E, X216T, X217L, X217R, X222L, X224T, X228S, X234V, X236N, X236Q, X238F, X240F, X242S, X245A, X245N, X246V, X248K, X248N, X251R, X251S, X252S, X256E, X256K, X256P, X256R, X256Y, X265S, X267N, X271F, X271W, X272K, X272N, X272Q, X275H, and X275R; (iii) X1G, X7C, X9T, X27M, X38Q, X38T, X40D, X45Q, X45R, X48E, X48Q, X52F, X52Q, X52T, X53D, X53E, X53Y, X76D, X78A, X91H, X100A, X114T, X17S, X118R, X122V, X128A, X128D, X128E, X128H, X128K, X128L, X128M, X128N, X128Q, X128R, X128S, X128T, X128V, X128W, X128Y, X129D, X129E, X129F, X129G, X129H, X129I, X129K, X129L, X129M, X129N, X129P, X129Q, X129R, X129T, X129V, X129Y, X130A, X130D, X130E, X130F, X130G, X130H, X130I, X130L, X130M, X130N, X130Q, X130R, X130T, X130V, X130W, X130Y, X140D, X147A, X149G, X156D, X156H, X156N, X156T, X158T, X158V, X159D, X159N, X160D, X166D, X166H, X166Y, X181N, X182E, X194P, X209V, X217R, X222L, X228S, X234V, X236N, X236Q, X238F, X245A, X248D, X248K, X248N, X256E, X256P, X256R, X269K, X270C, X271G, X272K, X272Q, X273V, X275R, and X275Y, (iv) X1G, X1T, X24R, X24T, X30V, X38A, X38Q, X38T, X40D, X40E, X40L, X40V, X48Q, X52A, X52N, X52Q, X52T, X53D, X53E, X53N, X76D, X78A, X78D, X78G, X78S, X79I, X86P, X87S, X88V, X89E, X91H, X93T, X97G, X100A, X100K, X103E, X103S, X104V, X106S, X111L, X114A, X114T, X115G, X116E, X116N, X117E, X117S, X18R, X120H, X122A, X124L, X128A, X128D, X128E, X128H, X128K, X128M, X128N, X128Q, X128S, X128Y, X129D, X129E, X129G, X129H, X129I, X129K, X129L, X129M, X129N, X129P, X129Q, X129R, X129T, X129V, X129Y, X130F, X130H, X130I, X130Y, X131P, X133A, X133D, X133V, X134T, X136E, X139V, X141S, X143T, X144S, X147A, X147V, X148L, X149G, X149L, X149N, X149S, X150V, X153S, X156A, X156H, X156N, X158T, X158V, X159D, X159E, X159N, X159Q, X166A, X166D, X166H, X166N, X166S, X166Y, X182E, X185Q, X194P, X209F, X209V, X209Y, X212S, X213T, X216T, X217L, X217R, X222L, X224T, X236N, X236Q, X238F, X248K, X248N, X251R, X251S, X252S, X256E, X256K, X256P, X256R, X256Y, X272K, X272N, X272Q, X275H, and X275R; (v) X1G, X1T, X24R, X24T, X30V, X38A, X38Q, X38T, X400D, X40E, X40L, X40V, X52A, X52N, X52Q, X52T, X53D, X53E, X53N, X76D, X78A, X78D, X78G, X78S, X79I, X86P, X87S, X88V, X89E, X93T, X97G, X100A, X100K, X103E, X103S, X104V, X106S, X111L, X14A, X114T, X115G, X116E, X116N, X117E, X117S, X18R, X120H, X122A, X124L, X128A, X128D, X128E, X128H, X128K, X128M, X128N, X128Q, X128S, X128Y, X129D, X129E, X129G, X129H, X129I, X129K, X129L, X129M, X129N, X129P, X129Q, X129R, X129T, X129V, X129Y, X131P, X133A, X133D, X133V, X134T, X136E, X139V, X141S, X143T, X144S, X147A, X147V, X148L, X149G, X149L, X149N, X149S, X150V, X153S, X156A, X156H, X156N, X158T, X158V, X159D, X159E, X159N, X159Q, X166A, X166D, X166H, X166N, X166S, X166Y, X182E, X185Q, X194P, X209F, X209V, X209Y, X212S, X213T, X216T, X217L, X217R, X222L, X224T, X236N, X236Q, X238F, X248K, X248N, X251R, X251S, X252S, X256E, X256K, X256P, X256R, X256Y, X272K, X272N, X272Q, X275H, and X275R; or (vi) X1G, X38Q, X40D, X48Q, X52F, X52T, X53E, X53Y, X76D, X91H, X114T, X117S, X118R, X128D, X128M, X128V, X129F, X129M, X129R, X129V, X130F, X130H, X130I, X130Y, X147A, X149G, X156N, X158T, X159N, X166D, X166H, X182E, X217R, X238F, X248N, X256E, X256P, X256R, and X272K; wherein X is any amino acid and the amino acid positions of the variant or recombinant polypeptide or active fragment thereof are numbered by correspondence with the amino acid sequence of SEQ ID NO:10. Another embodiment is directed to a protease variant, or a recombinant polypeptide or an active fragment thereof comprising an amino acid sequence comprising two or more substitutions selected from: (i) X52T, X53D, X76D, X86P, X97G, X103S, X104V, X106S, X111L, X114A, X115G, X116N, X118R, X120H, X122A, X124L, X128D, X128S, X129F, X130Y, X131P, X134T, X136E, X139V, X141S, X143T, X144S, X147V, X148L, X150V, X156N, X158T, X159D, X166D, X217R, X248N, and X272K; (ii) X53D, X76D, X106S, X128S, X131P, X134T, X139V, X158T, X159D, X166D, X217R, X248N, and X272K: (iii) X52T, X53D, X76D, X106S, X118R, X128D, X129F, X130Y, X131P, X134T, X139V, X156N, X166D, X217R, X248N, and X272K; (iv) X52T, X53D, X76D, X118R, X128S, X156N, X158T, X166D, X217R, and X248N; (v) X53D, X76D, X128S, X158T, X166D, and X248N; (vi) X52T, X53D, X76D, X118R, X128S, X156N, X158T, X166D, X217R, and X248N; or (vii) X52T-X129F, X53D-X66D, X76D-X166D, X166H-X159D, X166D-X272K, X53D-X76D-X66D, X53D-X18R-X166D, X53D-X166D-X272K, X76D-X118R-X166D, X76D-X166D-X248K, X76D-X166D-X256R, and X76D-X166D-X272K; wherein X is any amino acid and the amino acid positions of the variant or recombinant polypeptide or active fragment thereof are numbered by correspondence with the amino acid sequence of SEQ ID NO: 10.

[0007] An even further embodiment is directed to a protease variant, or a recombinant poly peptide or an active fragment thereof comprising an amino acid sequence comprising two or more substitutions selected from: (i) A001G, A001T, T003E, T003V, G007C, P009I, P009T, P009V, A019R, S024R, S024T, K027S, K027T, I030V, N038A, N038Q, N038T, A040D, A040E, A040L, A040V, N043D, N043H, N043L, N043S, K045Q, K045R, A048E, A048Q, S052A, S052N, S052Q, S052T, G053D, G053E, G053N, A057P, V072A, N076D, T078A, T078D, T078G, T078S, T079I, Y086P, N087S, A088V, D089E, D089S, L090P, Y091H, V093T, S097G, S099L, G100A, G100K, S101T, T103E, T103S, L104V, G106S, I007T, I107V, I111L, S114A, S114T, I115G, S116E, S116N, N117E, N117S, G118R, N120H, I122A, N123D, M124L, G128A, G128D, G128E, G128H, G128K, G128M, G128N, G128Q, G128S, G128Y, S129D, S129E, S129G, S129H, S129I, S129K, S129L, S129M, S129N, S129P, S129Q, S129R, S129T, S129V, S129Y, S130A, S130E, S130F, S130G, S130H, S130I, S130L, S130M, S130N, S130Q, S130R, S130T, S130V, S130W, S130Y, G131P, T133A, T133D, T133V, A134T, Q136E, C139V, N140D, N140Y, N14I, Y143T, N144S, R145N, R145W, I147A, I147V, V148L, V149G, V149L, V149N, V149S, I150V, A153S, S156A, S156H, S156N, S158T, S158V, S159D, S159E, S159N, S159Q, G160D, G166A, G166D, G166H, G166N, G166S, G166Y, S181A, S181N, S182E, T185Q, S188Y, S194P, T209F, T209V, T209Y, N212S, N213T, A215D, A215E, S216T, F217L, F217R, M222L, A224T, A228S, I234V, A236N, A236Q, Y238F, S240F, T242S, Q245A, Q245N, I246V, E248K, E248N, K251R, K251S, N252S, N256E, N256K, N256P, N256R, N256Y, K265S, V267N, N269K, V270C, E271F, E271W, S272K, S272N, S272Q, A273V, Q275H, and Q275R; (ii) A001G, A001T, T003E, T003V, P009I, P009T, P009V, A019R, S024R, S024T, K027S, K027T, I030V, N038A, N038Q, N038T, A040D, A040E, A040L, A040V, N043D, N043H, N043L, N043S, K045Q, K045R, A048E, A048Q, S052A, S052N, S052Q, S052T, G053D, G053E, G053N, A057P, V072A, N076D, T078A, T078D, T078G, T078S, T079I, Y086P, N087S, A088V, D089E, D089S, L090P, Y091H, V093T, S097G, S099L, G100A, G100K, S101T, T103E, T103S, L104V, G106S, I107T, I107V, I111L, S114A, S114T, I115G, S116E, S116N, N117E, N117S, G118R, N120H, I122A, N123D, M124L, G128A, G128D, G128E, G128H, G128K, G128M, G128N, G128Q, G128S, G128Y, S129D, S129E, S129G, S129H, S129I, S129K, S129L, S129M, S129N, S129P, S129Q, S129R, S129T, S129V, S129Y, S130A, S130E, S130F, S130G, S130H, S130I, S130L, S130M, S130N, S130Q, S130R, S130T, S130V, S130W, S130Y, G131P, T133A, T133D, T133V, A134T, Q136E, C139V, N40D, N4Y, N14I, Y143T, N144S, R145N, R145W, I147A, I147V, V148L, V149N, V149L, V149N, V149S, I150V, A153S, S156A, S156H, S156N, S158T, S158V, S159D, S159E, S159N, S159Q, G160D, G166A, 0166D, G166H, G166N, G166S, G166Y, S181A, S181N, S182E, T185Q, S188Y, S194P, T209F, T209V, T209Y, N212S, N213T, A215D, A215E, S216T, F217L, F217R, M222L, A224T, A228S, I234V, A236N, A236Q, Y238F, S240F, T242S, Q245A, Q245N, I246V, E248K, E248N, K251R, K251S, N252S, N256E, N256K, N256P, N256R, N256Y, K26S, V267N, E271F, E271W, S272K, S272N, S272Q, Q275H, and Q275R: (iii) A001G, G007C, P009T, K027M, N038Q, N038T, A040D, K045Q, K045R, A048E, A048Q, S052F, S052Q, S052T, G053D, G053E, G053Y, N076D, T078A, Y091H, G100A, S114T, N17S, G118R, I122V, G128A, G128D, G128E, G128H, G128K, G128L, G128M, G128N, G128Q, G128R, G128S, G128T, G128V, G128W, G128Y, S129D, S129E, S129F, S129G, S129H, S129I, S129K, S129L, S129M, S129N, S129P, S129Q, S129R, S129T, S129V, S129Y, S130A, S130D, S130E, S130F, S130G, S130H, S130I, S130L, S130M, S130N, S130G, S130R, S130T, S130V, S130W, S130Y, N140D, I147A, V149G, S156D, S156H, S156N, S156T, S158T, S158V, S159D, S159N, G160D, G166D, G166H, G166Y, S181N, S182E, S194P, T209V, F217R, M222L, Y238F, Q245A, E248D, E248K, E248N, N256E, N256P, N256R, N269K, V270C, E271G, S272K, S272Q, A273V, Q275R, and Q275Y; (iv) A001G, A001T, S024T, I030V, N038Q, A040D, A048Q, S052A, S052Q, S052T, G053D, G053E, N076D, T078D, T078S, T079I, Y086P, N087S, A088V, D089E, D089S, Y091H, V093T, S097G, G100A, T103E, T103S, L104V, G106S, I111L, S114A, S114T, I115G, S116N, N117S, G118R, N120H, I122A, M124L, G128S, S129P, S130I, S130H, S130I, S130Y, G131P, T133A, T133V, A134T, Q136E, C139V, N141S, Y143T, N144S, I147A, I147V, V148L, V149G, V149L, I150V, A153S, S156H, S156N, S158T, S159D, S159N, G166D, G166H, G166S, S182E, T185Q, S194P, T209Y, N212S, N213T, S216T, F217L, F217R, M222L, A224T, A236N, Y238F, E248N, K251S, N252S, N256P, N256R, N256Y, S272K, S272Q, and Q275H; (v) A001G, A001T, S024T, I030V, N038Q, A040D, S052A, S052Q, S052T, G053D, G053E, N076D, T078D, T078S, T079I, Y086P, N087S, A088V, D089E, D089S, V093T, S097G, G100A, T103E, T103S, L104V, G106S, I111L, S114A, S114T, I115G, S116N, N117S, G118R, N120H, I122A, M124L, G128S, S129P, G131P, T133A, T133V, A134T, Q136E, C139V, N141S, Y143T, N144, I147A, I147V, V148L, V149G, V149L, I150V, A153S, S156H, S156N, S158T, S159D, S159N, G166D, G166H, G166S, S182E, T185Q, S194P, T209Y, N212S, N213T, S216T, F217L, F217R, M222L, A224T, A236N, Y238F, E248N, K251S, N252S, N256P, N256R, N256Y, S272K, S272Q, and Q275H; or (vi) A001G, N038Q, A040D, A048Q, S052F, S052T, G053E, G053Y, N076D, Y091H, S114T, N117S, G118R, G128D, G128M, G128V, S129F, S129M, S129R, S129V, S130F, S130H, S130I, S130Y, I147A, V149G, S156N, S158T, S159N, G166D, G166H, S182E, F217R, Y238F, E248N, N256E, N256P, N256R, and S272K; wherein the amino acid positions of the variant or recombinant polypeptide or active fragment thereof are numbered by correspondence with the amino acid sequence of SEQ ID NO: 10. A still further embodiment is directed to a protease variant, or a recombinant polypeptide or an active fragment thereof comprising an amino acid sequence comprising two or more substitutions selected from: (i) S52T, G53D, N76D, Y086P, S097G, T103S, L104V, G106S, I111L, S114A, I115G, S116N, G118R, N120H, I122A, M124L, G128D, G128S, S129F, S129P, S130Y, G131P, A134T, Q136E, C139V, N141S, Y143T, N144S, I147V, V148L, I150V, S156N, S158T, S159D, G166D, F217R, E248N, and S272K; (ii) G53D, N76D, G106S, G128S, G131P, A134T, C139V, S158T, S159D, G166D, F217R, E248N, and S272K; (iii) S52T, G53D, N76D, G118R, G128D, S129F, S130Y, G131P, A134T, C139V, S156N, G166D, F217R, E248N, and S272K; (iv) S52T, G53D, N76D, G118R, G128S, S156N, S158T, G166D, F217R, and E248N; (v) G53D, N76D, G128S, S158T, G166D, and E248N; (vi) S52T, G53D, N76D, G118R, S156N, S158T, G166D, F217R, and E248N; or (vii) S52T-S129F, G53D-G166D, N76D-G166D, G166H-S159D, G166D-S272K, G53D-N76D-G166D, G53D-G118R-G166D, G53D-G166D-S272K, N76D-G118R-G166D, N76D-G166D-E248K, N76D-G166D-N256R, and N76D-G166D-S272K; wherein the amino acid positions of the variant or recombinant polypeptide or active fragment thereof are numbered by correspondence with the amino acid sequence of SEQ ID NO: 10.

[0008] An even still further embodiment is directed to a protease variant, or a recombinant polypeptide or an active fragment thereof comprising an amino acid sequence comprising one or more deletions at one or more positions selected from 53, 55, 56, 57, and 58 or G053, P055. N056. A057 and L058; wherein the amino acid positions of the variant, or recombinant polypeptide or active fragment thereof are numbered by correspondence with the amino acid sequence of SEQ ID NO: 10.

[0009] Another embodiment is directed to an LG12-Clade of subtilisins comprising one or more protease variants described herein, or recombinant polypeptide or an active fragment thereof, wherein said variant, or recombinant polypeptide or active fragment thereof comprises an EPNALQDGNGHGTH (SEQ ID NO:44) motif. In a still further embodiment, one or more protease variant described herein, or recombinant polypeptide or an active fragment thereof comprises an amino acid sequence having at least 75% amino acid sequence identity to SEQ ID NO:10. In yet still other embodiments, one or more protease variant described herein, or recombinant polypeptide or an active fragment thereof has protease activity in the presence of a surfactant, cleaning activity in a detergent composition, or a combination thereof. In an even further embodiment, one or more protease variant described herein, or recombinant polypeptide or an active fragment thereof has one or more improved property selected from improved cleaning performance, improved stability, and improved residual protease activity when compared to SEQ ID NO: 10 and/or 48. A still further embodiment is directed to a polynucleotide comprising a nucleic acid sequence that encodes a protease variant, or recombinant polypeptide or active fragment thereof described herein.

[0010] An even further embodiment is directed to a composition containing one or more protease variants described herein, or recombinant polypeptide or an active fragment thereof. In yet still an even further embodiment, the composition described herein contains phosphate, is phosphate-free, contains borate, is boron-free, or combinations thereof. In other embodiments, the composition is a boron-free composition. In some embodiments, a boron-free composition is a composition to which a borate stabilizer has not been added. In another embodiment, a boron-free composition is a composition that contains less than 5.5% boron. In a still further embodiment, a boron-free composition is a composition that contains less than 4.5% boron. In yet still another embodiment, a boron-free composition is a composition that contains less than 3.5% boron. In yet still further embodiments, a boron-free composition is a composition that contains less than 2.5% boron. In even further embodiments, a boron-free composition is a composition that contains less than 1.5% boron. In another embodiment, a boron-free composition is a composition that contains less than 1.0% boron. In still further embodiments, a boron-free composition is a composition that contains less than 0.5% boron. In other embodiments, the composition is a cleaning composition. In yet further embodiments, the cleaning composition is a detergent composition. In still further embodiments, a boron-free composition is a composition substantially-free of boron.

[0011] In some embodiments, the serine protease enzymes disclosed herein find use in soil removal, grain ethanol production, animal feed, food processing and digestive aids, leather processing, and/or personal care. In still further embodiments, the serine protease enzyme variants disclosed herein can be combined with other enzymes useful in detergent compositions. Still further embodiments provide methods for using the serine protease enzyme variants disclosed herein.

[0012] Serine protease enzymes can be improved by engineering the enzyme to have better cleaning performance, stability in the presence of chemical agents, and/or thermostability over currently available serine protease enzymes. In some embodiments, the serine protease enzyme variants disclosed herein have a minimum performing index (PI) for wash performance, stability of the enzyme in detergent compositions and thermostability of the enzyme, while having at least one of these characteristics improved from a parent serine protease enzyme. In further embodiments, the serine protease enzymes disclosed herein are particularly well suited to and useful in a variety of cleaning applications. In some embodiments, the serine protease enzymes are LG12-clade serine protease variants. In other embodiments, the serine protease enzyme variants disclosed herein have one or more modifications, such as a substitution, insertion or deletion, as compared to a parent serine protease enzyme. In some embodiments, the protease variant, or recombinant polypeptide or active fragment thereof is derived from a reference polypeptide selected from SEQ ID NOs:10, 18, 19, 45, 46, 57, 58, and 66. In other embodiments the reference polypeptide is LG12 wild-type protease (SEQ ID NO:10).

[0013] FIG. 1A-1B provides a Clustal W protein sequence alignment of LG12-Clade proteases (LG12-CP022, LG12-CP180, LG12-CP446, LG12-CP455, LG12-CP460, LG12-CP462, and LG12-CP465) and parent LG12 wild-type protease.

[0014] FIG. 2 provides a structure of the LG12 wild-type protease depicting the key loops comprising residues 97-104, 126-130, 150-170 and 207-220 that form the substrate binding region in which the overall folding is represented as a schematic in light gray; the catalytic triad formed by Aspartic acid 32. Histidine 64 and Serine 221 is shown as black stick figures; the two calcium sites common to all commercial bacterial subtilisins are represented as dark gray spheres; and the key loops forming the substrate binding region are set forth as black lines.

[0015] FIG. 3 provides a 3D structure of the LG12 wild-type protease depicting (i) side chains of substitutions common to the best LG2-Clade protease variants, which substitutions are primarily localized in two segments that form the walls of the substrate binding site and the following helical segments that serve to anchor the residue 97-148 segment, (ii) substitutions 158, 166 and 217, which line the substrate binding cavity, and (iii) substitutions at positions 76, 78, 79 and 86, which are near one of the critical calcium binding sites.

[0016] FIG. 4A-4F provides the Clustal W alignment of various Bacillus subtilisin mature protease sequences including members of the LG2-clade.

[0017] FIG. 5 provides the phylogenetic tree of LG12-clade proteases and various other Bacillus subtilisins.

[0018] FIG. 6 provides a structure of LG12 wild-type protease depicting the catalytic triad formed by Aspartic acid 32. Histidine 64 and Serine 221 and the region including residues 54-59 leading into His 64 of the triad in which the overall fold of the main chain is shown in light gray; the side chains of the catalytic triad formed by Aspartic acid 32, Histidine 64 and Serine 221 are shown as black sticks; Histidine 64 is indicated by the arrow: the region including residues 54-59 leading into Histidine 64 of the triad are also shown as black sticks.

[0019] FIG. 7 provides a crystallographic structure of LG12 wild-type protease in which the region 54-59 in the sequence EPNALQ of LG12, shown as black sticks, is compared with the equivalent loop segment in subtilisin BPN′ (pdb entry 2ST1), shown as gray lines.

[0020] FIG. 8 provides a crystallographic structure of LG2 wild-type protease in which the region 54-59 in the sequence EPNALQ of LG12, shown as black sticks, is compared with the equivalent loop segment in subtilisin Carlsberg (pdb entry 3UNX), shown as gray lines.

[0021] FIG. 9 provides a crystallographic structure of LG12 wild-type protease in which the region 54-59 in the sequence EPNALQ of LG12, shown as black sticks, is compared with the equivalent loop segment in subtilisin from B. Lentus, shown as gray lines.

[0022] FIG. 10 A-10F provides the Clustal W alignment of various LG12-clade mature protease sequences.

[0023] FIG. 11 provides a phylogenetic tree of LG12-clade proteases.

[0024] It is to be appreciated those certain feature of the invention, which are, for clarity, described above and below in the context of separate embodiments, may also be provided in combination in a single embodiment. Conversely, various features of the invention that are, for brevity, described in the context of a single embodiment, may also be provided separately or in any sub-combination.

[0025] Unless otherwise indicated, the practice of the present invention involves conventional techniques commonly used in molecular biology, protein engineering, microbiology, and recombinant DNA, which are within the skill of the art. Such techniques are known to those of skill in the art and are described in numerous texts and reference works well known to those of skill in the art. All patents, patent applications, articles and publications mentioned herein, both supra and infra, are hereby expressly incorporated herein by reference.

[0026] Unless defined otherwise herein, all technical and scientific terms used herein have the same meaning as commonly understood by one of ordinary skill in the art to which this invention pertains. Many technical dictionaries are known to those of skill in the art. Although any methods and materials similar or equivalent to those described herein find use in the practice of the present invention, some suitable methods and materials are described herein. Accordingly, the terms defined immediately below are more fully described by reference to the Specification as a whole. Also, as used herein, the singular “a”, “an” and “the” includes the plural reference unless the context clearly indicates otherwise. Numeric ranges are inclusive of the numbers defining the range. Unless otherwise indicated, nucleic acids are written left to right in 5′ to 3′ orientation: amino acid sequences are written left to right in amino to carboxy orientation, respectively. It is to be understood that this invention is not limited to the particular methodology, protocols, and reagents described, as these may vary, depending upon the context they are used by those of skill in the art.

[0027] The practice of the present invention employs, unless otherwise indicated, conventional techniques of protein purification, molecular biology, microbiology, recombinant DNA techniques and protein sequencing, all of which are within the skill of those in the art.

[0028] Furthermore, the headings provided herein are not limitations of the various aspects or embodiments of the invention which can be had by reference to the specification as a whole. Accordingly, the terms defined immediately below are more fully defined by reference to the specification as a whole. Nonetheless, in order to facilitate understanding of the invention, a number of terms are defined below.

[0029] It is intended that every maximum numerical limitation given throughout this specification include every lower numerical limitation, as if such lower numerical limitations were expressly written herein. Every minimum numerical limitation given throughout this specification will include every higher numerical limitation, as if such higher numerical limitations were expressly written herein. Every numerical range given throughout this specification will include every narrower numerical range that falls within such broader numerical range, as if such narrower numerical ranges were all expressly written herein.

[0030] The terms “protease” and “proteinase” refer to an enzyme protein that has the ability to break down other proteins. A protease has the ability to conduct “proteolysis,” which begins protein catabolism by hydrolysis of peptide bonds that link amino acids together in a peptide or polypeptide chain forming the protein. This activity of a protease as a protein-digesting enzyme is referred to as “proteolytic activity.” Many well known procedures exist for measuring proteolytic activity (See e.g., Kalisz. “Microbial Proteinases.” In: Fiechter (ed.), Advances in Biochemical Engineering/Biotechnology, (1988)). For example, proteolytic activity may be ascertained by comparative assays which analyze the respective protease's ability to hydrolyze a commercial substrate. Exemplary substrates useful in the analysis of protease or proteolytic activity, include, but are not limited to, di-methyl casein (Sigma C-9801), bovine collagen (Sigma C-9879), bovine elastin (Sigma E-1625), and bovine keratin (ICN Biomedical 902111). Colorimetric assays utilizing these substrates are well known in the art (See e.g., WO 99/34011 and U.S. Pat. No. 6,376,450, both of which are incorporated herein by reference). The pNA assay (See e.g., Del Mar et al., Anal. Biochem. 99:316-320 [1979]) also finds use in determining the active enzyme concentration for fractions collected during gradient elution. This assay measures the rate at which p-nitroaniline is released as the enzyme hydrolyzes a soluble synthetic peptide substrate, such as succinyl-alanine-alanine-proline-phenylalanine-p-nitroanilide (suc-AAPF-pNA), and cleavage occurs between the C-terminal amino acid (phenylalanine) and the p-NA, causing the production of yellow color from the hydrolysis reaction, which is measured at 410 nm on a spectrophotometer and is proportional to the active enzyme concentration. Measurement of the color change allows calculation of the rate of the reaction. In addition, absorbance measurements at 280 nanometers (nm) can be used to determine the total protein concentration. The active enzyme/total protein ratio gives the enzyme purity when a reference standard is used.

[0031] The phrase “composition(s) substantially-free of boron” or “detergent(s) substantially-free of boron” refers to composition(s) or detergent(s), respectively, that contain trace amounts of boron, for example, about 1000 ppm (1 mg/kg or litre equals 1 ppm), about 100 ppm, about 50 ppm, about 10 ppm, or about 5 ppm, or about 1 ppm, perhaps from other composition or detergent constituents.

[0032] The phrase “variant polypeptide” refers to a polypeptide comprising an amino acid sequence that differs in at least one amino acid residue from the amino acid sequence of a parent or reference polypeptide (including but not limited to wild-type polypeptides).

[0033] The phrase “protease variant” refers to a polypeptide that is derived from a reference polypeptide by the substitution, addition, or deletion, of one or more amino acids, typically by recombinant DNA techniques.

[0034] The phrase “the genus Bacillus” includes all species within the genus “Bacillus,” as known to those of skill in the art, including but not limited to B. subtilis, B. lichenformis, B. lentis, B. brevis, B, stearothermophilus, B. alkolophilus, B. amyloliquefaciens, B. clausii, B. halodurans, B. pumilus, B, gibsonii. B. pseudofirmus, B. lehensis, B. megaterium, B. coagulans. B. circulans, B. lautus, and B. thuringiensis. It is recognized that the genus Bacillus continues to undergo taxonomical reorganization. Thus, it is intended that the genus include species that have been reclassified, including but not limited to such organisms as B. stearothermophilus, which is now named “Geobacillus stearothermophilus.” The production of resistant endospores in the presence of oxygen is considered the defining feature of the genus Bacillus, although this characteristic also applies to the recently named Alicyclobacillus, Amphibacilluts, Aneurinibacillus. Anoxybacillus, Brevibacillus, Filobacillus, Gracilibacillus, Halobacillus, Paenibacillus, Salibacillus, Thermobacillus, Ureibacillus, and Virgibacillus.

[0035] The terms “polynucleotide” and “nucleic acid,” which are used interchangeably herein, refer to a polymer of any length of nucleotide monomers covalently bonded in a chain. DNA (deoxyribonucleic acid), a polynucleotide comprising deoxyribonucleotides, and RNA (ribonucleic acid), a polymer of ribonucleotides, are examples of polynucleotides or nucleic acids having distinct biological function. Polynucleotides or nucleic acids include, but are not limited to, a single-, double- or triple-stranded DNA, genomic DNA, cDNA, RNA, DNA-RNA hybrid, or a polymer comprising purine and pyrimidine bases, or other natural, chemically, biochemically modified, non-natural or derivatized nucleotide bases. The following are non-limiting examples of polynucleotides: genes, gene fragments, chromosomal fragments, expressed sequence tag(s) (EST(s)), exons, introns, messenger RNA (mRNA), transfer RNA (tRNA), ribosomal RNA (rRNA), ribozymes, complementary DNA (cDNA), recombinant polynucleotides, branched polynucleotides, plasmids, vectors, isolated DNA of any sequence, isolated RNA of any sequence, nucleic acid probes, and primers. In some embodiments, polynucleotides comprise modified nucleotides, such as methylated nucleotides and nucleotide analogs, uracyl, other sugars and linking groups such as fluororibose and thioate, and nucleotide branches. In a particular embodiment, a sequence of nucleotides is interrupted by non-nucleotide components.

[0036] The term “mutation” refers to changes made in a starting amino acid or nucleic acid sequence. It is intended that the term encompass substitutions, insertions and deletions.

[0037] The term “vector” refers to a nucleic acid construct or polynucleotide construct used to introduce or transfer nucleic acid(s) or polynucleotide(s) into a target cell or tissue. A vector is typically used to introduce foreign DNA into another cell or tissue. A vector generally comprises a DNA sequence that is a transgene and a larger polynucleotide sequence that serves as the “backbone” of the vector. The vector typically serves to transfers genetic information, such as the inserted transgene, to a target cell or tissue so as to isolate, multiply, or express the insert in the target cell or tissue. Vectors include plasmids, cloning vectors, bacteriophages, viruses (e.g., viral vector), cosmids, expression vectors, shuttle vectors, cassettes, and the like. A vector typically includes an origin of replication, a multicloning site, and a selectable marker. The process of inserting a vector into a target cell is typically referred to as transfection. The transfection of a cell with a viral vector is typically referred to as transduction. The present invention includes, in some embodiments, a vector that comprises a DNA sequence encoding a variant protease (e.g., precursor or mature variant protease) that is operably linked to a suitable pro sequence (e.g., secretory, signal peptide sequence, etc.) capable of effecting the expression of the DNA sequence in a suitable host.

[0038] The phrase “expression cassette,” “expression plasmid” or “expression vector” refers to a nucleic acid construct or vector generated recombinantly or synthetically for the expression of a nucleic acid of interest (e.g., a foreign nucleic acid or transgene) in a target cell. The nucleic acid of interest typically expresses a protein of interest. An expression vector or expression cassette typically comprises a promoter nucleotide sequence that drives or promotes expression of the foreign nucleic acid. The expression vector or cassette also typically includes any other specified nucleic acid elements that permit transcription of a particular nucleic acid in a target cell. A recombinant expression cassette can be incorporated into a plasmid, chromosome, mitochondrial DNA, plastid DNA, virus, or nucleic acid fragment. Some expression vectors have the ability to incorporate and express heterologous DNA fragments in a host cell. Many prokaryotic and eukaryotic expression vectors are commercially available. Selection of appropriate expression vectors is within the knowledge of those of skill in the art. Selection of appropriate expression vectors for expression of a protein from a nucleic acid sequence incorporated into the expression vector is within the knowledge of those of skill in the art.

[0039] A DNA construct is an artificially constructed segment of nucleic acid that may be introduced into a target cell or tissue. A DNA construct typically comprises a DNA insert comprising a nucleotide sequence encoding a protein of interest that has been subcloned into a vector. The vector may contain bacterial resistance genes for growth in bacteria and a promoter for expression of the protein of interest in an organism. The DNA may be generated in vitro by PCR or any other suitable technique(s) known to those in the art. In some embodiments, the DNA construct comprises a nucleic acid sequence of interest. In some embodiments, the sequence is operably linked to additional elements such as control elements (e.g., promoters, etc.). The DNA construct may further comprise a selectable marker and may further comprise an incoming sequence flanked by homology boxes. The construct may comprise other non-homologous sequences, added to the ends (e.g., stuffer sequences or flanks). In some embodiments, the ends of the sequence are closed such that the DNA construct forms a closed circle. The nucleic acid sequence of interest, which is incorporated into the DNA construct, using techniques well known in the art, may be a wild-type, mutant, or modified nucleic acid. In some embodiments, the DNA construct comprises one or more nucleic acid sequences homologous to the host cell chromosome. In other embodiments, the DNA construct comprises one or more non-homologous nucleotide sequences. Once the DNA construct is assembled in vitro, it may be used, for example, to: 1) insert heterologous sequences into a desired target sequence of a host cell; and/or 2) mutagenize a region of the host cell chromosome (i.e., replace an endogenous sequence with a heterologous sequence); 3) delete target genes; and/or 4) introduce a replicating plasmid into the host. “DNA construct” is used interchangeably herein with “expression cassette.”

[0040] The term “plasmid” refers to an extrachromosomal DNA molecule which is capable of replicating independently from the chromosomal DNA. A plasmid is double stranded (ds) and may be circular and is typically used as a cloning vector.

[0041] As used herein in the context of introducing a nucleic acid sequence into a cell, the term “introduced” refers to any method suitable for transferring the nucleic acid sequence into the cell. Such methods for introduction include but are not limited to protoplast fusion, transfection, transformation, electroporation, conjugation, and transduction (See e.g., Ferrari et al., “Genetics.” in Hardwood et al. (eds.). Bacillus Plenum Publishing Corp., pp. 57-72 [1989]).

[0042] The term “transformation refers to the genetic alteration of a cell which results from the uptake, genomic incorporation, and expression of genetic material (e.g., DNA).

[0043] As used herein, a nucleic acid is “operably linked” with another nucleic acid sequence when it is placed into a functional relationship with another nucleic acid sequence. For example, a promoter or enhancer is operably linked to a nucleotide coding sequence if the promoter affects the transcription of the coding sequence. A ribosome binding site may be operably linked to a coding sequence if it is positioned so as to facilitate translation of the coding sequence. Typically, “operably linked” DNA sequences are contiguous. However, enhancers do not have to be contiguous. Linking is accomplished by ligation at convenient restriction sites. If such sites do not exist, synthetic oligonucleotide adaptors or linkers may be used in accordance with conventional practice.

[0044] The term “gene” refers to a polynucleotide (e.g., a DNA segment), that encodes a polypeptide and includes regions preceding and following the coding regions as well as intervening sequences (introns) between individual coding segments (exons).

[0045] The term “recombinant” when used with reference to a cell typically indicates that the cell has been modified by the introduction of a heterologous nucleic acid sequence or that the cell is derived from a cell so modified. For example, a recombinant cell may comprise a gene not found in identical form within the native (non-recombinant) form of the cell, or a recombinant cell may comprise a native gene (found in the native form of the cell) but which has been modified and re-introduced into the cell. A recombinant cell may comprise a nucleic acid endogenous to the cell that has been modified without removing the nucleic acid from the cell; such modifications include those obtained by gene replacement, site-specific mutation, and related techniques known to those of ordinary skill in the art. Recombinant DNA technology includes techniques for the production of recombinant DNA in vitro and transfer of the recombinant DNA into cells where it may be expressed or propagated, thereby producing a recombinant polypeptide. “Recombination,” “recombining,” and “recombined” of polynucleotides or nucleic acids refer generally to the assembly or combining of two or more nucleic acid or polynucleotide strands or fragments to generate a new polynucleotide or nucleic acid. The recombinant polynucleotide or nucleic acid is sometimes referred to as a chimera. A nucleic acid or polypeptide is “recombinant” when it is artificial or engineered, or derived from an artificial or engineered protein or nucleic acid.

[0046] A nucleic acid or polynucleotide is said to “encode” a polypeptide if, in its native state or when manipulated by methods known to those of skill in the art, it can be transcribed and/or translated to produce a protease variant described herein, or a recombinant polypeptide or a fragment thereof. The anti-sense strand of such a nucleic acid is also said to encode the sequence.

[0047] The phrase “host strain” or “host cell” refers to a suitable host for an expression vector comprising a polynucleotide sequence that expresses a protease variant described herein, or recombinant polypeptide or active fragment thereof in the host strain or host cell.

[0048] A “protein” or “polypeptide” comprises a polymeric sequence of amino acid residues. The terms “protein” and “polypeptide” are used interchangeably herein. The single and 3-letter code for amino acids as defined in conformity with the IUPAC-IUB Joint Commission on Biochemical Nomenclature (JCBN) is used throughout this disclosure. The single letter X refers to any of the twenty amino acids. It is also understood that a polypeptide may be coded for by more than one nucleotide sequence due to the degeneracy of the genetic code. Mutations are named by the one letter code for the parent amino acid, followed by a three or two digit position number and then the one letter code for the variant amino acid. For example, mutating glycine (G) at position 87 to serine (S) is represented as “G087S” or “G87S”. Multiple mutations are indicated by inserting a “-” between the mutations. Mutations at positions 87 and 90 are represented as either “G087S-A090Y” or “G87S-A90Y” or “G87S+A90Y” or “G087S+A090Y”.

[0049] A “prosequence” or “propeptide sequence” refers to an amino acid sequence between the signal peptide sequence and mature protease sequence that is necessary for proper folding and the secretion of the protease. Cleavage of the prosequence or propeptide sequence results in a mature active protease. The prosequence may be endogenous or the sequence may occur is a highly related protein such as another subtilisin. The prosequence may be a naturally occurring sequence or a variant sequence derived by recombinant technology, such as, for example, is described in U.S. provisional patent application No. 62/181,192, filed Jun. 17, 2015

[0050] The phrase “signal sequence” or “signal peptide” refers to a sequence of amino acid residues that may participate in the secretion or direct transport of the mature or precursor form of a protein. The signal sequence is typically located N-terminal to the precursor or mature protein sequence. The signal sequence may be endogenous or exogenous. A signal sequence is normally absent from the mature protein. A signal sequence is typically cleaved from the protein by a signal peptidase after the protein is transported.

[0051] The phrase “hybrid signal sequence” refers to signal sequences in which part of sequence is obtained from the expression host fused to the signal sequence of the gene to be expressed. In some embodiments, synthetic sequences are utilized.

[0052] The term “mature” form of a protein, polypeptide, or peptide refers to the functional form of the protein, polypeptide, or peptide without the signal peptide sequence and propeptide sequence.

[0053] The term “precursor” form of a protein or peptide refers to a mature form of the protein having a prosequence operably linked to the amino or carbonyl terminus of the protein. The precursor may also have a “signal” sequence operably linked to the amino terminus of the prosequence. The precursor may also have additional polynucleotides that are involved in post-translational activity (e.g., polynucleotides cleaved therefrom to leave the mature form of a protein or peptide).

[0054] The term “wild-type” in reference to an amino acid sequence or nucleic acid sequence indicates that the amino acid sequence or nucleic acid sequence is native or naturally occurring sequence. As used herein, the term “naturally-occurring” refers to anything (e.g., proteins, amino acids, or nucleic acid sequences) that are found in nature (i.e., have not been manipulated by means of recombinant methods).

[0055] The phrase “non-naturally occurring” refers to anything that is not found in nature (e.g., recombinant polynucleotides or polypeptides produced in the laboratory).

[0056] As used herein with regard to amino acid residue positions, “corresponding to” or “corresponds to” or “corresponds” refers to an amino acid residue at the enumerated position in a protein or peptide, or an amino acid residue that is analogous, homologous, or equivalent to an enumerated residue in a protein or peptide. As used herein. “corresponding region” generally refers to an analogous position in a related proteins or a reference protein.

[0057] The phrases “derived from” and “obtained from” refer to not only a protein produced or producible by a strain of the organism in question, but also a protease encoded by a DNA sequence isolated from such strain and produced in a host organism containing such DNA sequence. Additionally, the term refers to a protein which is encoded by a DNA sequence of synthetic and/or cDNA origin and which has the identifying characteristics of the protease in question. To exemplify, “proteases derived from Bacillus” refers to those enzymes having proteolytic activity which are naturally produced by Bacillus, as well as to serine proteases like those produced by Bacillus sources but which through the use of genetic engineering techniques are produced by a Bacillus strain or non-Bacillus organisms transformed with a nucleic acid encoding the serine proteases.

[0058] The phrase “homologous genes” refers to a pair of genes from different, but usually related species, which correspond to each other and which are identical or very similar to each other. The term encompasses genes that are separated by speciation (i.e., the development of new species) (e.g., orthologous genes), as well as genes that have been separated by genetic duplication (e.g., paralogous genes).

[0059] The term “homology” refers to sequence similarity or identity, with identity being preferred. Homology, may be determined using standard techniques known in the art (&e e.g., Smith and Waterman. Adv. Appl. Math. 2:482 [1981]; Needleman and Wunsch. J. Mol. Biol. 48:443 [1970]; Pearson and Lipman. Proc. Natl. Acad. Sci. USA 85:2444 [1988]; software programs such as GAP, BESTFIT, FASTA, and TFASTA in the Wisconsin Genetics Software Package (Genetics Computer Group, Madison, Wis.); and Devereux et al., Nucl. Acid Res. 12:387-395 [1984]). One example of a useful algorithun is PILEUP. PILEUP creates a multiple sequence alignment from a group of related sequences using progressive, pair-wise alignments. It can also plot a tree showing the clustering relationships used to create the alignment. PILEUP uses a simplification of the progressive alignment method of Feng and Doolittle (&e. Feng and Doolittle, J. Mol. Evol. 35:351-360 [1987]). The method is similar to that described by Higgins and Sharp (See, Higgins and Sharp, CABIOS 5:151-153 [1989]). Useful PILEUP parameters including a default gap weight of 3.00, a default gap length weight of 0.10, and weighted end gaps.

[0060] Percent “identical” or “identity” in the context of two or more nucleic acid or polypeptide sequences refers to two or more sequences that are the same or have a specified percentage of nucleic acid residues or amino acid residues, respectively, that are the same, when compared and aligned for maximum similarity, as determined using a sequence comparison algorithm or by visual inspection. “Percent sequence identity” or “% identity” or “% sequence identity or “% amino acid sequence identity” of a subject amino acid sequence to a reference (i.e., query) amino acid sequence means that the subject amino acid sequence is identical (i.e., on an amino acid-by-amino acid basis) by a specified percentage to the query amino acid sequence over a comparison length when the sequences are optimally aligned. Thus. 80% amino acid sequence identity or 80% identity with respect to two amino acid sequences means that 80% of the amino acid residues in two optimally aligned amino acid sequences are identical.

[0061] In some embodiments, the “percent sequence identity” or “% sequence identity” or “% identity” of a subject sequence to a query sequence can be calculated by optimally aligning the two sequences and comparing the two optimally aligned sequences over the comparison length. The number of positions in the optimal alignment at which identical residues occur in both sequences is determined, thereby providing the number of matched positions, and the number of matched positions is then divided by the total number of positions of the comparison length (which, unless otherwise specified, is the length of the query sequence). The resulting number is multiplied by 100 to yield the percent sequence identity of the subject sequence to the query sequence. The percent sequence identity between a reference sequence and a protease variant described herein may be readily determined by one skilled in the art. The percent identity shared by polynucleotide or polypeptide sequences is determined by direct comparison of the sequence information between the molecules by aligning the sequences and determining the identity by methods known in the art.

[0062] Sequence identity may be determined using known programs such as BLAST, ALIGN, and CLUSTAL using standard parameters. (See, e.g., Altschul et al. [1990] J. Mol. Biol. 215:403-410; Henikoff et al. [1989] Proc. Natl. Acad. Sci. USA 89:10915; Karin et al. [1993] Proc. Natl. Acad. Sci USA 90:5873; and Higgins et al. [1988] Gene 73:237-244). Software for performing BLAST analyses is publicly available through the National Center for Biotechnology Information. Databases may also be searched using FASTA (Pearson et al. [1988] Proc. Natl. Acad. Sci. USA 85:2444-2448). One indication that two polypeptides are substantially identical is that the first polypeptide is immunologically cross-reactive with the second polypeptide. Typically, polypeptides that differ by conservative amino acid substitutions are immunologically cross-reactive. Thus, a polypeptide is substantially identical to a second polypeptide, for example, where the two peptides differ only by a conservative substitution. Another useful algorithm for comparison of multiple protein sequences is the MUSCLE program from Geneious software (Biomatters Ltd.) (Robert C. Edgar. MUSCLE: multiple sequence alignment with high accuracy and high throughput Nucl. Acids Res. (2004) 32 (5): 1792-1797).

[0063] The phrase “optimal alignment” or “optimally aligned” refers to the alignment of two (or more) sequences giving the highest percent identity score. For example, optimal alignment of two protein sequences can be achieved by manually aligning the sequences such that the maximum number of identical amino acid residues in each sequence are aligned together or by using software programs or procedures described herein or known in the art. Optimal alignment of two nucleic acid sequences can be achieved by manually aligning the sequences so that the maximum number of identical nucleotides in each sequence are aligned together or by using software programs or procedures described herein or known in the art. In some embodiments, two polypeptide sequences are deemed “optimally aligned” when they are aligned using defined parameters, such as a defined amino acid substitution matrix, gap existence penalty (also termed gap open penalty), and gap extension penalty, so as to achieve the highest similarity score possible for that pair of sequences. The BLOSUM62 scoring matrix (See, Henikoff and Henikoff, supra) is often used as a default scoring substitution matrix in polypeptide sequence alignment algorithms (e.g., BLASTP). The gap existence penalty is imposed for the introduction of a single amino acid gap in one of the aligned sequences, and the gap extension penalty is imposed for each residue position in the gap. Exemplary alignment parameters employed are: BLOSUM62 scoring matrix, gap existence penalty=11, and gap extension penalty=1. The alignment score is defined by the amino acid positions of each sequence at which the alignment begins and ends (e.g., the alignment window), and optionally by the insertion of a gap or multiple gaps into one or both sequences, so as to achieve the highest possible similarity score.

[0064] A nucleic acid or polynucleotide is “isolated” when it is partially or completely separated from other components, including but not limited to for example, other proteins, nucleic acids, cells, etc. Similarly, a polypeptide, protein or peptide is “isolated” when it is partially or completely separated from other components, including but not limited to for example, other proteins, nucleic acids, cells, etc. On a molar basis, an isolated species is more abundant than are other species in a composition. For example, an isolated species may comprise at least about 50%, about 70%, about 80%, about 85%, about 90%, about 91%, about 92%, about 93%, about 94%, about 95%, about 96%, about 97%, about 98%, about 99%, or about 100% (on a molar basis) of all macromolecular species present. Preferably, the species of interest is purified to essential homogeneity (i.e., contaminant species cannot be detected in the composition by conventional detection methods). Purity and homogeneity can be determined using a number of techniques well known in the art, such as agarose or polyacrylamide gel electrophoresis of a protein or nucleic acid sample, followed by visualization upon staining. If desired, a high-resolution technique, such as high performance liquid chromatography (HPLC) or a similar means can be utilized for purification of the material.

[0065] The term “purified” as applied to nucleic acids or polypeptides generally denotes a nucleic acid or polypeptide that is essentially free from other components as determined by analytical techniques well known in the art (e.g., a purified polypeptide or polynucleotide forms a discrete band in an electrophoretic gel, chromatographic eluate, and/or a media subjected to density gradient centrifugation). For example, a nucleic acid or polypeptide that gives rise to essentially one band in an electrophoretic gel is “purified.” A purified nucleic acid or polypeptide is at least about 50% pure, usually at least about 75%, about 80%, about 85%, about 90%, about 91%, about 92%, about 93%, about 94%, about 95%, about 96/%, about 97%, about 98%, about 99%, about 99.5%, about 99.6%, about 99.7%, about 99.8% or more pure (e.g., percent by weight on a molar basis). In a related sense, the invention provides methods of enriching compositions for one or more molecules of the invention, such as one or more polypeptides or polynucleotides of the invention. A composition is enriched for a molecule when there is a substantial increase in the concentration of the molecule after application of a purification or enrichment technique. A substantially pure polypeptide or polynucleotide of the invention (e.g., substantially pure variant protease or polynucleotide encoding a variant protease of the invention, respectively) will typically comprise at least about 55%, about 60%, about 70%, about 80%, about 85%, about 90%, about 91%, about 92%, about 93%, about 94%, about 95%, about 96%, about 97%, about 98, about 99%, about 99.5% or more by weight (on a molar basis) of all macromolecular species in a particular composition.

[0066] In a related sense, the invention provides methods of enriching compositions for one or more molecules of the invention, such as one or more polypeptides of the invention (e.g., one or more variant proteases of the invention) or one or more nucleic acids of the invention (e.g., one or more nucleic acids encoding one or more variant proteases of the invention). A composition is enriched for a molecule when there is a substantial increase in the concentration of the molecule after application of a purification or enrichment technique.

[0067] The phrase “improved property” when used in connection with a protease variant described herein refers to a protease variant with improved residual protease activity, improved cleaning performance and/or improved stability optionally with retained cleaning performance relative to the corresponding reference polypeptide.

[0068] The phrase “functional assay” refers to an assay that provides an indication of a protein's activity. In some embodiments, the term refers to assay systems in which a protein is analyzed for its ability to function in its usual capacity. For example, in the case of enzymes, a functional assay involves determining the effectiveness of the enzyme in catalyzing a reaction.

[0069] The phrase “thermally stable” and “thermostable” and “thermostability” refer to proteases that retain a specified amount of enzymatic activity after exposure to identified temperatures over a given period of time under conditions prevailing during the proteolytic, hydrolyzing, cleaning or other process of the invention, while being exposed to altered temperatures. “Altered temperatures” encompass increased or decreased temperatures. In some embodiments, the proteases retain at least about 50%, about 60%, about 70%, about 75%, about 80%, about 85%, about 90%, about 92%, about 95%, about 96%, about 97%, about 98%, or about 99% proteolytic activity after exposure to altered temperatures over a given time period, for example, at least about 60 minutes, about 120 minutes, about 180 minutes, about 240 minutes, about 300 minutes, etc.

[0070] The phrase “improved stability” in the context of an oxidation, chelator, thermal and/or pH stable protease refers to a higher retained proteolytic activity over time as compared to other proteases (e.g., LG12 and BPN′-Y217L proteases) and/or wild-type enzymes.

[0071] The phrase “diminished stability” in the context of an oxidation, chelator, thermal and/or pH stable protease refers to a lower retained proteolytic activity over time as compared to other proteases (e.g., LG12 proteases) and/or wild-type enzymes.

[0072] The phrase “cleaning activity” refers to a cleaning performance achieved by a variant protease or reference protease under conditions prevailing during the proteolytic, hydrolyzing, cleaning, soil/stain removal, or other process of the invention. In some embodiments, cleaning performance of a protease variant described herein or reference protease/polypeptide may be determined by using various assays for cleaning one or more various enzyme sensitive stains on an item or surface (e.g., a stain resulting from food, grass, blood, ink, milk, oil, and/or egg protein). Cleaning performance of a protease variant or reference protease/polypeptide can be determined by subjecting a protein stain on the item or surface to standard wash condition(s) and assessing the degree to which the stain is removed by using various chromatographic, spectrophotometric, or other quantitative methodologies. A protein stain includes, for example, egg yolk, blood, milk, ink, grass, pigment, oil, creme brulee, pasta, cheese, and combinations thereof. Exemplary cleaning assays and methods are known in the art and include, but are not limited to those described in WO 99/34011 and U.S. Pat. No. 6,605,458, both of which are herein incorporated by reference, as well as those cleaning assays and methods included in the Examples provided below.

[0073] The phrase “cleaning effective amount” of a variant protease or reference protease refers to the amount of protease that achieves a desired level of enzymatic activity in a specific cleaning composition. Such effective amounts are readily ascertained by one of ordinary skill in the art and are based on many factors, such as the particular protease used, the cleaning application, the specific composition of the cleaning composition, and whether a liquid or dry (e.g., granular, tablet, bar) composition is required, etc. The term “soil removal index” (SRI) of a variant protease or reference protease refers to the degree of soil removal achieved by a certain quantity of enzyme or enzymatic activity.

[0074] The phrase “cleaning adjunct material” refers to any liquid, solid, or gaseous material included in cleaning composition other than a variant protease of the invention. In some embodiments, the cleaning compositions of the present invention include one of more cleaning adjunct materials. Each cleaning adjunct material is typically selected depending on the particular type and form of cleaning composition (e.g., liquid, granule, powder, bar, paste, spray, tablet, gel, foam, or other composition). Preferably, each cleaning adjunct material is compatible with the protease enzyme used in the composition.

[0075] The phrase “improved cleaning performance” in the context of cleaning activity refers to an increased or greater cleaning activity by an enzyme on certain enzyme sensitive stains such as, for example, egg, milk, grass, ink, oil, pigment, and/or blood, as determined by usual evaluation after a standard wash cycle and/or multiple wash cycles. The phrase “diminished cleaning performance” in the context of cleaning activity refers to a decreased or lesser cleaning activity by an enzyme on certain enzyme sensitive stains such as, for example, egg, milk, grass, ink, oil pigment and/or blood, as determined by usual evaluation after a standard wash cycle. Cleaning performance can be determined by comparing the protease variants of the present invention with reference proteases in various cleaning assays concerning enzyme sensitive stains such as, for example, egg, grass, blood, ink, oil, pigment and/or milk as determined by usual spectrophotometric or analytical methodologies after standard wash cycle conditions.

[0076] The phrase “consumer product” means fabric and home care product.

[0077] The phrase “fabric and home care product” or “fabric and household care product” includes products generally intended to be used or consumed in the form in which they are sold and that are for treating fabrics, hard surfaces and any other surfaces, and cleaning systems all for the care and cleaning of inanimate surfaces, as well as fabric conditioner products and other products designed specifically for the care and maintenance of fabrics, and air care products, including: air care including air fresheners and scent delivery systems, car care, pet care, livestock care, personal care, jewelry care, dishwashing, fabric conditioning (including softening and/or freshening), laundry detergency, laundry and rinse additive and/or care, pre-treatment cleaning compositions, hard surface cleaning and/or treatment including floor and toilet bowl cleaners, glass cleaners and/or treatments, tile cleaners and/or treatments, ceramic cleaners and/or treatments, and other cleaning for consumer or institutional use. In some embodiments, the fabric and home care products are suitable for use on wounds and/or skin. “Fabric and home care product” includes consumer and institutional products.

[0078] The phrase “institutional cleaning composition” refers to products suitable for use in institutions including but not limited to schools, hospitals, factories, stores, corporations, buildings, restaurants, office complexes and buildings, processing and/or manufacturing plants, veterinary hospitals, factory farms, factory ranches, etc.

[0079] The phrase “cleaning and/or treatment composition” is a subset of fabric and home care products that includes, unless otherwise indicated, compositions suitable for cleaning and/or treating items. Such products include, but are not limited to, products for treating fabrics, hard surfaces and any other surfaces in the area of fabric and home care, including: air care including air fresheners and scent delivery systems, car care, dishwashing, fabric conditioning (including softening and/or freshening), laundry detergency, laundry and rinse additive and/or care, hard surface cleaning and/or treatment including floor and toilet bowl cleaners, granular or powder-form all-purpose or “heavy-duty” washing agents, especially cleaning detergents; liquid, gel or paste-form all-purpose washing agents, especially the so-called heavy-duty liquid types; liquid fine-fabric detergents; hand dishwashing agents or light duty dishwashing agents, especially those of the high-foaming type; machine dishwashing agents, including the various tablet, granular, liquid and rinse-aid types for household and institutional use: car or carpet shampoos, bathroom cleaners including toilet bowl cleaners; as well as cleaning auxiliaries such as bleach additives and “stain-stick” or pre-treat types, substrate-laden products such as dryer added sheets.

[0080] The phrase “cleaning composition” or “cleaning formulation” of the invention refers to any composition of the invention useful for removing or eliminating a compound (e.g., undesired compound) from an object, item or surface to be cleaned, including, but not limited to for example, a fabric, fabric item, dishware item, tableware item, glassware item, contact lens, other solid substrate, hair (shampoo) (including human or animal hair), skin (soap or and cream), teeth (mouthwashes, toothpastes), surface of an item or object (e.g., hard surfaces, such as the hard surface of a table, table top, wall furniture item, floor, ceiling, non-dishware item, non-tableware item, etc.), filters, membranes (e.g., filtration membranes, including but not limited to ultrafiltration membranes), etc. The term encompasses any material and/or added compound selected for the particular type of cleaning composition desired and the form of the product (e.g., liquid, gel, granule, spray, or other composition), as long as the composition is compatible with the protease and other enzyme(s) used in the composition. The specific selection of cleaning composition materials are readily made by considering the surface, object, item, or fabric to be cleaned, and the desired form of the composition for the cleaning conditions during use.

[0081] Cleaning compositions and cleaning formulations include any composition that is suited for cleaning, bleaching, disinfecting, and/or sterilizing any object, item, and/or surface. Such compositions and formulations include, but are not limited to for example, liquid and/or solid compositions, including cleaning or detergent compositions, such as, for example, liquid, tablet, gel, bar, granule, and/or solid laundry cleaning or detergent compositions and fine fabric detergent compositions: hard surface cleaning compositions and formulations, such as, for example, glass, wood, ceramic and metal counter tops and windows; carpet cleaners; oven cleaners; fabric fresheners; fabric softeners: and textile, laundry booster cleaning or detergent compositions, laundry additive cleaning compositions, and laundry pre-spotter cleaning compositions; dishwashing compositions, including hand or manual dishwash compositions (e.g., “hand” or “manual” dishwashing detergents) and automatic dishwashing (ADW) compositions (e.g., “automatic dishwashing detergents”).

[0082] Cleaning composition or cleaning formulations, as used herein, include, unless otherwise indicated, granular or powder-form all-purpose or heavy-duty washing agents, especially cleaning detergents: liquid, granular, gel, solid, tablet, or paste-form all-purpose washing agents, especially the so-called heavy-duty liquid (HDL) detergent or heavy-duty powder detergent (HDD) types; liquid fine-fabric detergents; hand or manual dishwashing agents, including those of the high-foaming type; hand or manual dishwashing, automatic dishwashing, or dishware or tableware washing agents, including the various tablet, powder, solid, granular, liquid, gel, and rinse-aid types for household and institutional use; liquid cleaning and disinfecting agents, including antibacterial hand-wash types, cleaning bars, mouthwashes, denture cleaners, car shampoos, carpet shampoos, bathroom cleaners; hair shampoos and/or hair-rinses for humans and other animals; shower gels and foam baths and metal cleaners; as well as cleaning auxiliaries, such as bleach additives and “stain-stick” or pre-treat types. In some embodiments, granular compositions are in “compact” form; in some embodiments, liquid compositions are in a “concentrated” form.

[0083] As used herein. “fabric cleaning compositions” include hand and machine laundry detergent compositions including laundry additive compositions and compositions suitable for use in the soaking and/or pretreatment of stained fabrics (e.g., clothes, linens, and other textile materials).

[0084] The phrase “non-fabric cleaning compositions” include non-textile (i.e., non-fabric) surface cleaning compositions, including, but not limited to for example, hand or manual or automatic dishwashing detergent compositions, oral cleaning compositions, denture cleaning compositions, and personal cleansing compositions.

[0085] The phrase “fabric and/or hard surface cleaning and/or treatment composition” is a subset of cleaning and treatment compositions that includes, unless otherwise indicated, granular or powder-form all-purpose or “heavy-duty” washing agents, especially cleaning detergents; liquid, gel or paste-form all-purpose washing agents, especially the so-called heavy-duty liquid types liquid fine-fabric detergents; hand dishwashing agents or light duty dishwashing agents, especially those of the high-foaming type; machine dishwashing agents, including the various tablet, granular, liquid and rinse-aid types for household and institutional use; liquid cleaning and disinfecting agents, car or carpet shampoos, bathroom cleaners including toilet bowl cleaners; fabric conditioning products including softening and/or freshening that may be in liquid, solid and/or dryer sheet form: as well as cleaning auxiliaries such as bleach additives and “stain-stick” or pre-treat types, substrate-laden products such as dryer added sheets. All of such products which are applicable may be in standard, concentrated or even highly concentrated form even to the extent that such products may in certain aspect be non-aqueous.

[0086] The phrase “detergent composition” or “detergent formulation” is used in reference to a composition intended for use in a wash medium for the cleaning of soiled or dirty objects, including particular fabric and/or non-fabric objects or items. Such compositions of the present invention are not limited to any particular detergent composition or formulation. Indeed, in some embodiments, the detergents of the invention comprise at least one variant protease of the invention and, in addition, one or more surfactants, transferase(s), hydrolytic enzymes, oxido reductases, builders (e.g., a builder salt), bleaching agents, bleach activators, bluing agents, fluorescent dyes, caking inhibitors, masking agents, enzyme activators, antioxidants, and/or solubilizers. In some instances, a builder salt is a mixture of a silicate salt and a phosphate salt, preferably with more silicate (e.g., sodium metasilicate) than phosphate (e.g., sodium tripolyphosphate). Some compositions of the invention, such as, but not limited to, cleaning compositions or detergent compositions, do not contain any phosphate (e.g., phosphate salt or phosphate builder).

[0087] The term “bleaching” refers to the treatment of a material (e.g., fabric, laundry, pulp, etc.) or surface for a sufficient length of time and/or under appropriate pH and/or temperature conditions to effect a brightening (i.e., whitening) and/or cleaning of the material. Examples of chemicals suitable for bleaching include, but are not limited to, for example, ClO₂, H₂O₂, peracids, NO₂, etc.

[0088] The term “disinfecting” refers to the removal of contaminants from the surfaces, as well as the inhibition or killing of microbes on the surfaces of items. It is not intended that the present invention be limited to any particular surface, item, or contaminant(s) or microbes to be removed.

[0089] The term “compact” form of the cleaning compositions herein is best reflected by density and, in terms of composition, by the amount of inorganic filler salt. Inorganic filler salts are conventional ingredients of detergent compositions in powder form. In conventional detergent compositions, the filler salts are present in substantial amounts, typically about 17 to about 35% by weight of the total composition. In contrast, in compact compositions, the filler salt is present in amounts not exceeding about 15% of the total composition. In some embodiments, the filler salt is present in amounts that do not exceed about 10%, or more preferably, about 5%, by weight of the composition. In some embodiments, the inorganic filler salts are selected from the alkali and alkaline-earth-metal salts of sulfates and chlorides. In some embodiments, the filler salt is sodium sulfate.

[0090] The position of an amino acid residue in a given amino acid sequence is typically numbered herein using the numbering of the position of the corresponding amino acid residue of the LG2 SprC (described as LG-12 SprC in Example 2, page 86, line 16 to page 87, line 14 of PCT Published Application WO2015/038792, filed Sep. 11, 2014, which is hereby incorporated herein by reference) amino acid sequence shown in SEQ ID NO: 10, which is also referred to interchangeably throughout as LG12 wild-type. A given amino acid sequence, such as a variant protease amino acid sequence described herein, can be aligned with the LG2 SprC sequence using an alignment algorithm as described herein, and an amino acid residue in the given amino acid sequence that aligns (preferably optimally aligns) with an amino acid residue in the LG12 SprC sequence can be conveniently numbered by reference to the corresponding amino acid residue in the LG2 SprC sequence.

[0091] Variants, compositions and methods disclosed herein relate to a protease variant, or a recombinant polypeptide or an active fragment thereof generated through conventional molecular biology techniques (see, e.g., Sambrook et al, Molecular Cloning: Cold Spring Harbor Laboratory Press). Some embodiments are directed to a protease variant, or a recombinant polypeptide or an active fragment thereof comprising an amino acid sequence comprising two or more substitutions at one or more positions selected from: (i) 1, 3, 7, 9, 19, 24, 27, 30, 38, 40, 43, 45, 48, 52, 53, 57, 72, 76, 78, 79, 86, 87, 88, 89, 90, 91, 93, 97, 99, 100, 101, 103, 104, 106, 107, 111, 114, 115, 116, 117, 118, 120, 122, 123, 124, 128, 129, 130, 131, 133, 134, 136, 139, 140, 141, 143, 144, 145, 147, 148, 149, 150, 153, 156, 158, 159, 160, 166, 181, 182, 185, 188, 194, 209, 212, 213, 215, 216, 217, 222, 224, 228, 234, 236, 238, 240, 242, 245, 246, 248, 251, 252, 256, 265, 267, 269, 270, 271, 272, 273, and 275; (ii) 1, 3, 9, 19, 24, 27, 30, 38, 40, 43, 45, 48, 52, 53, 57, 72, 76, 78, 79, 86, 87, 88, 89, 90, 91, 93, 97, 99, 100, 101, 103, 104, 106, 107, 111, 114, 115, 116, 117, 118, 120, 122, 123, 124, 128, 129, 130, 131, 133, 134, 136, 139, 140, 141, 143, 144, 145, 147, 148, 149, 150, 153, 156, 158, 159, 160, 166, 181, 182, 185, 188, 194, 209, 212, 213, 215, 216, 217, 222, 224, 228, 234, 236, 238, 240, 242, 245, 246, 248, 251, 252, 256, 265, 267, 271, 272, and 275; (iii) 1, 7, 9, 27, 38, 40, 45, 48, 52, 53, 76, 78, 91, 100, 114, 117, 118, 122, 128, 129, 130, 140, 147, 149, 156, 158, 159, 160, 166, 181, 182, 194, 209, 217, 222, 228, 234, 236, 238, 245, 248, 256, 269, 270, 271, 272, 273, and 275; (iv) 1, 24, 30, 38, 40, 48, 52, 53, 76, 78, 79, 86, 87, 88, 89, 91, 93, 97, 100, 103, 104, 106, 111, 114, 115, 116, 117, 118, 120, 122, 124, 128, 129, 130, 131, 133, 134, 136, 139, 141, 143, 144, 147, 148, 149, 150, 153, 156, 158, 159, 166, 182, 185, 194, 209, 212, 213, 216, 217, 222, 224, 236, 238, 248, 251, 252, 256, 272, and 275; (v) 1, 24, 30, 38, 40, 52, 53, 76, 78, 79, 86, 87, 88, 89, 93.97, 100, 103, 104, 106, 111, 114, 115, 116, 117.118, 120, 122, 124, 128, 129, 131, 133, 134, 136, 139, 141, 143, 144, 147, 148, 149, 150, 153, 156, 158, 159, 166, 182, 185, 194, 209, 212, 213, 216, 217, 222, 224, 236, 238, 248, 251, 252, 256, 272, and 275; or (vi) 1, 38, 40, 48, 52, 53, 76, 91, 114, 117, 118, 128, 129, 130, 147, 149, 156, 158, 159, 166, 182, 217, 238, 248, 256, and 272; wherein the amino acid positions of the variant or recombinant polypeptide or active fragment thereof are numbered by correspondence with the amino acid sequence of SEQ ID NO: 10. A further embodiment is directed to a protease variant, or a recombinant polypeptide or an active fragment thereof comprising an amino acid sequence comprising two or more substitutions at one or more positions selected from: (i) 1, 3, 9, 19, 24, 27, 30, 38, 40, 43, 45, 48, 52, 53, 57, 72, 76, 78, 79, 86, 87, 88, 89, 90, 91, 93, 97, 99, 100, 101, 103, 104, 106, 107, 111, 114, 115, 116, 117, 118, 120, 122, 123, 124, 128, 129, 130, 131, 133, 134, 136, 139, 140, 141, 143, 144, 145, 147, 148, 149, 150, 153, 156, 158, 159, 160, 166, 181, 182, 185, 188, 194, 209, 212, 213, 215, 216, 217, 222, 224, 228, 234, 236, 238, 240, 242, 245, 246, 248, 251, 252, 256, 265, 267, 271, 272, and 275; (ii) 1, 3, 9, 19, 24, 27, 30, 38, 40, 43, 45, 48, 52, 53, 57, 72, 76, 78, 79, 86, 87, 88, 89, 90, 91, 93, 97, 99, 100, 101, 103, 104, 106, 107, 111, 114, 115, 116, 117, 118, 120, 122, 123, 124, 128, 129, 130, 131, 133, 134, 136, 139, 140, 141, 143, 144, 145, 147, 148, 149, 150, 156, 158, 159, 160, 166, 181, 182, 185, 188, 194, 209, 212, 213, 215, 216, 217, 222, 224, 228, 234, 236, 238, 240, 242, 245, 246, 248, 251, 252, 256, 265. 267, 271, 272, and 275; (iii) 9, 38, 40, 45, 48, 52, 53, 76, 78, 100, 114, 117, 118, 128, 129, 130, 140, 147, 149, 156, 158, 159, 160, 166, 181, 182, 194, 209, 217, 234, 236, 238, 245, 248, 256, 272, and 275; (iv) 1, 24, 30, 38, 40, 48, 52, 53, 76, 78, 79, 86, 87, 88, 89, 91, 93, 97, 100, 103, 104, 106, 111, 114, 115, 116, 117, 118, 120, 122, 124, 128, 129, 130, 131, 133, 134, 136, 139, 141, 143, 144, 147, 148, 149, 150, 156, 158, 159, 166, 182, 185, 194, 209, 212, 213, 216, 217, 222, 224, 236, 238, 248, 251, 252, 256, 272, and 275; (v) 1, 24, 30, 38, 40, 52, 53, 76, 78, 79, 86, 87, 88, 89, 93, 97, 100, 103, 104, 106, 111, 114, 115, 116, 117, 118, 120, 122, 124, 128, 129, 131, 133, 134, 136, 139, 141, 143, 144, 147, 148, 149, 150, 156, 158, 159, 166, 182, 185, 194, 209, 212, 213, 216, 217, 222, 224, 236, 238, 248, 251, 252, 256, 272, and 275; or (vi) 38, 40, 48, 52, 53, 76, 114, 117, 118, 128, 129, 130, 147, 149, 156, 158, 159, 166, 182, 217, 238, 248, 256, and 272; wherein the amino acid positions of the variant or recombinant polypeptide or active fragment thereof are numbered by correspondence with the amino acid sequence of SEQ ID NO: 10. Another embodiment is directed to a protease variant, or a recombinant polypeptide or an active fragment thereof comprising an amino acid sequence comprising two or more substitutions at one or more position selected from: (i) 52, 53, 76, 86, 97, 103, 104, 106, 111, 114, 115, 116, 118, 120, 122, 124, 128, 129, 130, 131, 134, 136, 139, 141, 143, 144, 147, 148, 150, 156, 158, 159, 166, 217, 248, and 272; (ii) 53, 76, 106, 128, 131, 134, 139, 158, 159, 166, 217, 248, and 272; (iii) 52, 53, 76, 106, 118, 128, 129, 130, 131, 134, 139, 156, 158, 166, 217, 248, and 272; (iv) 52, 53, 76, 128, 118, 156, 158, 166, 217, and 248; (v) 53, 76, 128, 158, 166, and 248; (vi) 52, 53, 76, 118, 128, 156, 158, 166, 217, and 248; or (vii) 52-129, 53-166, 76-166, 166-159, 166-272, 53-76-166, 53-118-166, 53-166-272, 76-118-166, 76-166-248, 76-166-256, and 76-166-272; wherein the amino acid positions of the variant or recombinant polypeptide or active fragment thereof are numbered by correspondence with the amino acid sequence of SEQ ID NO: 10.

[0092] A still further embodiment is directed to a protease variant, or a recombinant polypeptide or an active fragment thereof comprising an amino acid sequence comprising two or more substitutions selected from: (i) A1X, T3X, G7X, P9X, A19X, S24X, K27X, I30X, N38X, A40X, N43X, K45X, A48X, S52X, G53X, A57X, V72X, N76X, T78X, T79X, Y86X, N87X, A88X, D89X, L90X, Y91X, V93X, S97X, S99X, G100X, S101X, T103X, L104X, G106X, I107X, I111X, S114X, I115X, S116X, N117X, G118X, N120X, I122X, N123X, M124X, G128X, S129X, S130X, G131X, T133X, A134X, Q136X, C139X, N140X, N141X, Y143X, N144X, R145X, I147X, V148X, V149X, I150X, A153X, S156X, S158X, S159X, G160X, G166X, S181X, S182X, T185X, S188X, S194X, T209X, N212X, N213X, A215X, S216X, F217X, M222X, A224X, A228X, I234X, A236X, Y238X, S240X, T242X, Q245X, I246X, E248X, K251X, N252X, N256X, K265X, V267X, N269X, V270X, E271X, S272X, A273X, and Q275X; (ii) A1X, T3X, P9X, A19X, S24X, K27X, I30X, N38X, A40X, N43X, K45X, A48X, S52X, G53X, A57X, V72X, N76X, T78X, T79X, Y86X, N87X, A88X, D89X, L90X, Y91X, V93X, S97X, S99X, G100X, S101X, T103X, L104X, G106X, I107X, I111X, S114X, I115X, S116X, N117X, G118X, N120X, I122X, N123X, M124X, G128X, S129X, S130X, G131X, T133X, A134X, Q136X, C139X, N140X, N141X, Y143X, N144X, R145X, I147X, V148X, V149X, I150X, A153X, S156X, S158X, S159X, G160X, G166X, S181X, S182X, T185X, S188X, S194X, T209X, N212X, N213X, A215X, S216X, F217X, M222X, A224X, A228X, I234X, A236X, Y238X, S240X, T242X, Q245X, I246X, E248X, K251X, N252X, N256X, K265X, V267X, E271X, S272X, and Q275X; (iii) A1X, G7X, P9X, K27X, N38X, A40X, K45X, A48X, S52X, G53X, N76X, T78X, Y91X, G160X, S114X, N117X, G118X, I122X, G128X, S129X, S130X, N140X, I147X, V149X, S156X, S158X, S159X, G160X, G166X, S181X, S182X, S194X, T209X, F217X, M222X, A228X, I234X, A236X, Y238X, Q245X, E248X, N256X, N269X, V270X, E271X, S272X, A273X, and Q275X; (iv) A1X, S24X, I30X, N38X, A40X, A48X, S52X, G53X, N76X, T78X, T79X, Y86X, N87X, A88X, D89X, Y91X, V93X, S97X, G100X, T003X, L104X, G106X, I111X, S114X, I115X, S116X, N117X, G118X, N120X, I122X, M124X, G128X, S129X, S130X, G113X, T133X, A134X, Q136X, C139X, N114X, Y143X, N144X, I147X, V148X, V149X, I150X, A153X, S156X, S158X, S159X, G166X, S182X, T185X, S194X, T209X, N212X, N213X, S216X, F217X, M222X, A224X, A236X, Y238X, E248X, K251X, N252X, N256X, S272X, and Q275X; (v) A1X, S24X, I30X, N38X, A40X, S52X, G53X, N76X, T78X, T79X, Y86X, N87X, A88X, D89X, V93X, S97X, G160X, T103X, L104X, G106X, I111X, S114X, I115X, S116X, N117X, G118X, N120X, I122X, M124X, G128X, S129X, G113l X, T133X, A134X, Q136X, C139X, N141X, Y143X, N144X, I147X, V148X, V149X, I150X, A153X, S156X, S158X, S159X, G166X, S182X, T185X, S194X, T209X, N212X, N213X, S216X, F217X, M222X, A224X, A236X, Y238X, E248X, K251X, N252X, N256X, S272X, and Q275X; or (vi) A1X, N38X, A40X, A48X, S52X, G53X, N76X, Y91X, S114X, N117X, G118X, G128X, S129X, S130X, I147X, V149X, S156X, S158X, S159X, G166X, S182X, F217X, Y238X, E248X, N256X, and S272X; wherein X is any amino acid and the amino acid positions of the variant or recombinant polypeptide or active fragment thereof are numbered by correspondence with the amino acid sequence of SEQ ID NO: 10. An an even still further embodiment is directed to a protease variant, or a recombinant polypeptide or an active fragment thereof comprising an amino acid sequence comprising two or more substitutions selected from: (i) A1X, T3X, P9X, A19X, S24X, K27X, I30X, N38X, A40X, N43X, K45X, A48X, S52X, G53X, A57X, V72X, N76X, T78X, T79X, Y86X, N87X, A88X, D89X, L90X, Y91X, V93X, S97X, S99X, G100X, S101X, T103X, L104X, G106X, I107X, I111X, S114X, I115X, S116X, N117X, G118X, N112X, I122X, N123X, M124X, G128X, S129X, S130X, G131X, T133X, A134X, Q136X, C139X, N140X, N141X, Y143X, N144X, R145X, I147X, V148X, V149X, I150X, A153X, S156X, S158X, S159X, G160X, G166X, S181X, S182X, T185X, S188X, S194X, T209X, N212X, N213X, A215X, S216X, F217X, M222X, A224X, A228X, I234X, A236X, Y238X, S240X, T242X, Q245X, I246X, E248X, K251X, N252X, N256X, K265X, V267X, E271X, S272X, and Q275X; (ii) A1X, T3X, P9X, A19X, S24X, K27X, I30X, N38X, A40X, N43X, K45X, A48X, S52X, G53X, A57X, V72X, N76X, T78X, T79X, Y86X, N87X, A88X, D89X, L90X, Y91X, V93X, S97X, S99X, G160X, S101X, T103X, L104X, G100X, I107X, I111X, S114X, I115X, S116X, N117X, G118X, N120X, I122X, N123X, M124X, G128X, S129X, S130X, G131X, T133X, A134X, Q136X, C139X, N140X, N141X, Y143X, N144X, R145X, I147X, V148X, V149X, I150X, S156X, S158X, S159X, G160X, G166X, S181X, S182X, T185X, S188X, S194X, T209X, N212X, N213X, A215X, S216X, F217X, M222X, A224X, A228X, 1234X, A236X, Y238X, S240X, T242X, Q245X, I246X, E248X, K251X, N252X, N256X, K265X, V267X, E271X, S272X, and Q275X; (iii) P9X, N38X, A40X, K45X, A48X, S52X, G53X, N76X, T78X, G100X, S114X, N117X, G118X, G128X, S129X, S30X, N140X, I147X, V149X, S156X, S158X, S159X, G160X, G166X, S181X, S182X, S194X, T209X, F217X, I234X, A236X, Y238X, Q245X, E248X, N256X, S272X, and Q275X; (iv) A1X, S24X, I30X, N38X, A40X, A48X, S52X, G53X, N76X, T78X, T79X, Y86X, N87X, A88X, D89X, Y91X, V93X, S97X, G100X, T103X, L104X, G106X, I111X, S114X, I115X, S116X, N117X, G118X, N120X, I122X, M124X, G128X, S129X, S130X, G131X, T133X, A134X, Q136X, C139X, N141X, Y143X, N144X, I147X, V148X, V149X, I150X, S156X, S158X, S159X, G166X, S182X, T185X, S194X, T209X, N212X, N213X, S216X, F217X, M222X, A224X, A236X, Y238X, E248X, K251X, N252X, N256X, S272X, and Q275X; (v) A1X, S24X, I30X, N38X, A40X, S52X, G53X, N76X, T78X, T79X, Y86X, N87X, A88X, D89X, V93X, S97X, G100X, T103X, L104X, G106X, I111X, S114X, I115X, S116X, N117X, G118X, N120X, I122X, M124X, G128X, S129X, G131X, T133X, A134X, Q136X, C139X, N141X, Y143X, N144X, I147X, V148X, V149X, I150X, S156X, S158X, S159X, G166X, S182X, T185X, S194X, T209X, N212X, N213X, S216X, F217X, M222X, A224X, A236X, Y238X, E248X, K251X, N252X, N256X, S272X, and Q275X; or (vi) N38X, A40X, A48X, S52X, G53X, N76X, S114X, N117X, G118X, G128X, S129X, S130X, I147X, V149X, S156X, S158X, S159X, G166X, S182X, F217X, Y238X, E248X, N256X, and S272X; wherein X is any amino acid and the amino acid positions of the variant or recombinant polypeptide or active fragment thereof are numbered by correspondence with the amino acid sequence of SEQ ID NO: 10. Yet still another embodiment is directed to a protease variant, or a recombinant polypeptide or an active fragment thereof comprising an amino acid sequence comprising two or more substitutions selected from: (i) S52X, G53X, N76X, Y86X, S97X, T103X, L04X, G106X, I111X, S114X, I115X, S116X, G118X, N120X, I122X, M124X, G128X, S129X, S130X, G131X, A134X, Q136X, C139X, N141X, Y143X, N144X, I147X, V148X, I150X, S156X, S158X, S159X, G166X, F217X, E248X, and S272X; (ii) G53X, N76X, G106X, G128X, G131X, A134X, C139X, S158X, S159X, G166X, F217X, E248X, and S272X; (iii) S52X, G53X, N76X, G106X, G118X, G128X, S129X, S130X, G131X, A134X, C139X, S156X, G166X, F217X, E248X, and S272X; (iv) S52X, G53X, N76X, G118X, G128X, S156X, S158X, G166X, F217X, and E248X; (v) G53X, N76X, G128X, S158X, G166X, and E248X; (vi) S52X, G53X, N76X, G118X, G128X, S156X, S158X, G166X, F217X, and E248X, or (vii) S52X-S129X, G53X-G166X, N76X-G166X, G166X-S159X, G166X-S272X, G53X-N76X-G166X, G53X-G118X-G166X, G53X-G166X-S272X, N76X-G166X, N76X-G166X-E248X, N76X-G166X-N256X, and N76X-G166X-S272X; wherein X is any amino acid and the amino acid positions of the variant or recombinant polypeptide or active fragment thereof are numbered by correspondence with the amino acid sequence of SEQ ID NO:10.

[0093] An even still further embodiment is directed to a protease variant, or a recombinant polypeptide or an active fragment thereof comprising an amino acid sequence comprising two or more substitutions selected from: (i) X1G, X1T, X3E, X3V, X7C, X9I, X9T, X9V, X19R, X24R, X24T, X27S, X27T, X30V, X38A, X38Q, X38T, X40D, X40E, X40L, X40V, X43D, X43H, X43L, X43S, X45Q, X45R, X48E, X48Q, X52A, X52N, X52Q, X52T, X53D, X53E, X53N, X57P, X72A, X76D, X78A, X78D, X78G, X78S, X79I, X86P, X87S, X88V, X89E, X89S, X90P, X91H, X93T, X97G, X99L, X100A, X100K, X101T, X103E, X103S, X104V, X106S, X107T, X107V, X111L, X114A, X114T, X115G, X116E, X116N, X117E, X117S, X118R, X120H, X122A X123D, X124L, X128A, X128D, X128E, X128H, X128K, X128M, X128N, X128Q, X128S, X128Y, X129D, X129E, X129G, X129H, X129I, X129K, X129L, X129M, X129N, X129P, X129Q, X129R, X129T, X129V, X129Y, X130A, X130E, X130F, X130G, X130H, X130I, X130L, X130M, X130N, X130Q, X130R, X130T, X130V, X130W, X130Y, X131P, X133A, X133D, X133V, X134T, X136E, X139V, X140D, X140Y, X141S, X143T, X144S, X145N, X145W, X147A, X147V, X148L, X149G, X149L, X149N, X149S, X150V, X153S, X156A, X156H, X156N, X158T, X158V, X159D, X159E, X159N, X159Q, X160D, X166A, X166D, X166H, X166N, X166S, X166Y, X181A, X181N, X182E, X185Q, X188Y, X194P, X209F, X209V, X209Y, X212S, X213T, X215D, X215E, X216T, X217L, X217R, X222L, X224T, X228S, X234V, X236N, X236Q, X238F, X240F, X242S, X245A, X245N, X246V, X248K, X248N, X251R, X251S, X252S, X256E, X256K, X256P, X256R, X256Y, X265S, X267N, X269K, X270C, X271F, X271W, X272K, X272N, X272Q, X273V, X275H, and X275R; (ii) X1G, X1T, X3E, X3V, X9I, X9T, X9V, X19R, X24R, X24T, X27S, X27T, X30V, X38A, X38Q, X38T, X40D, X40E, X40L, X40V, X43D, X43H, X43L, X43S, X45Q, X45R, X48E, X48Q, X52A, X52N, X52Q, X52T, X53D, X53E, X53N, X57P, X72A, X76D, X78A, X78D, X78G, X78S, X79I, X86P, X87S, X88V, X89E, X89S, X90P, X91H, X93T, X97G, X99L, X100A, X100K, X101T, X103E, X103S, X104V, X106S, X107T, X107V, X111L, X114A, X114T, X115G, X116E, X116N, X117E, X117S, X118R, X120H, X122A, X123D, X124L, X128A, X128D, X128E, X128H, X128K, X128M, X128N, X128Q, X128S, X128Y, X129D, X129E, X129O, X129H, X129I, X129K, X129L, X129M, X129N, X129P, X129Q, X129R, X129T, X129V, X129Y, X130A, X130E, X130F, X130G, X130H, X301, X130L, X130M, X130N, X130Q, X130R, X130T, X130V, X130W, X130Y, X131P, X133A, X133D, X133V, X134T, X136E, X139V, X140D, X140Y, X141S, X143T, X144S, X145N, X145W, X147A, X147V, X148L, X149G, X149L, X149N, X149S, X150V, X153S, X156A, X156H, X156N, X158T, X158V, X159D, X159E, X159N, X159Q, X160D, X166A, X166D, X166H, X166N, X166S, X166Y, X181A, X181N, X182E, X185Q, X188Y, X194P, X209F, X209V, X209Y, X212S, X213T, X215D, X215E, X216T, X217L, X217R, X222L, X224T, X228S, X234V, X236N, X236Q, X238F, X240F, X242S, X245A, X245N, X246V, X248K, X248N, X251R, X251S, X252S, X256E, X256K, X256P, X256R, X256Y, X265S, X267N, X271F, X271W, X272K, X272N, X272Q, X275H, and X275R; (iii) X1G, X7C, X9T, X27M, X38Q, X38T, X40D, X45Q, X45R, X48E, X48Q, X52F, X52Q, X52T, X53D, X53E, X53Y, X76D, X78A, X91H, X100A, X114T, X117S, X118R, X122V, X128A, X128D, X128E, X128H, X128K, X128L, X128M, X128N, X128Q, X128R, X128S, X128T, X128V, X128W, X128Y, X129D, X129E, X129F, X129G, X129H, X129I, X129K, X129L, X129M, X129N, X129P, X129Q, X129R, X129T, X129V, X129Y, X130A, X130D, X130E, X130F, X130G, X130H, X130I, X130L, X130M, X130N, X130Q, X130R, X130T, X130V, X130W, X130Y, X140D, X147A, X149G, X156D, X156H, X156N, X156T, X158T, X158V, X159D, X159N, X160D, X166D, X166H, X166Y, X181N, X182E, X194P, X209V, X217R, X222L, X228S, X234V, X236N, X236Q, X238F, X245A, X248D, X248K, X248N, X256E, X256P, X256R, X269K, X270C, X271G, X272K, X272Q, X273V, X275R, and X275Y, (iv) X1G, X1T, X24R, X24T, X30V, X38A, X38Q, X38T, X40D, X40E, X40L, X40V, X48Q, X52A, X52N, X52Q, X52T, X53D, X53E, X53N, X76D, X78A, X78D, X78G, X78S, X79I, X86P, X87S, X88V, X89E, X91H, X93T, X97G, X100A, X100K, X103E, X103S, X104V, X106S, X111L, X114A, X114T, X115G, X116E, X116N, X17E, X17S, X18R, X120H, X122A, X124L, X128A, X128D, X128E, X128H, X128K, X128M, X128N, X128Q, X128S, X128Y, X129D, X129E, X129G, X129H, X129I, X129K, X129L, X129M, X129N, X129P, X129Q, X129R, X129T, X129V, X129Y, X130F, X130H, X130I, X130Y, X131P, X133A, X133D, X133V, X134T, X136E, X139V, X141S, X143T, X144S, X147A, X147V, X148L, X149G, X149L, X149N, X149S, X150V, X153S, X156A, X156H, X156N, X158T, X158V, X159D, X159E, X159N, X159Q, X166A, X166D, X166H, X166N, X166S, X166Y, X182E, X185Q, X194P, X209F, X209V, X209Y, X212S, X213T, X216T, X217L, X217R, X222L, X224T, X236N, X236Q, X238F, X248K, X248N, X251R, X251S, X252S, X256E, X256K, X256P, X256R, X256Y, X272K, X272N, X272Q, X275H, and X275R; (v) X1G, X1T, X24R, X24T, X30V, X38A, X38Q, X38T, X40D, X40E, X40L, X40V, X52A, X52N, X52Q, X52T, X53D, X53E, X53N, X76D, X78A, X78D, X78G, X78S, X79I, X86P, X87S, X88V, X89E, X93T, X97G, X100A, X100K, X103E, X103S, X104V, X106S, X111L, X114A, X114T, X115G, X116E, X116N, X117E, X117S, X118R, X120H, X122A, X124L, X128A, X128D, X128E, X128H, X128K, X128M, X128N, X128Q, X128S, X128Y, X129D, X129E, X129G, X129H, X129I, X129K, X129L, X129M, X129N, X129P, X129Q, X129R, X129T, X129V, X129Y, X131P, X133A, X133D, X133V, X134T, X136E, X139V, X141S, X143T, X144S, X147A, X147V, X148L, X149G, X149L, X149N, X149S, X150V, X153S, X156A, X156H, X156N, X158T, X158V, X159D, X159E, X159N, X159Q, X166A, X166D, X166H, X166N, X166S, X166Y, X182E, X185Q, X194P, X209F, X209V, X209Y, X212S, X213T, X216T, X217L, X217R, X222L, X224T, X236N, X236Q, X238F, X248K, X248N, X251R, X251S, X252S, X256E, X256K, X256P, X256R, X256Y, X272K, X272N, X272Q, X275H, and X275R; or (vi) X1G, X38Q, X40D, X48Q, X52F, X52T, X53E, X53Y, X76D, X91H, X114T, X117S, X118R, X128D, X128M, X128V, X129F, X129M, X129R, X129V, X130F, X130H, X130I, X130Y, X147A, X149G, X156N, X158T, X159N, X166D, X166H, X182E, X217R, X238F, X248N, X256E, X256P, X256R, and X272K; wherein X is any amino acid and the amino acid positions of the variant or recombinant polypeptide or active fragment thereof are numbered by correspondence with the amino acid sequence of SEQ ID NO: 10. An even yet still further embodiment is directed to a protease variant, or a recombinant polypeptide or an active fragment thereof comprising an amino acid sequence comprising two or more substitutions selected from: (i) X1G, X11T, X3E, X3V, X9I, X9T, X9V, X119R, X24R, X24T, X27S, X27T, X30V, X38A, X38Q, X38T, X40D, X40E, X40L, X40V, X43D, X43H, X43L, X43S, X45Q, X45R, X48E, X48Q, X52A, X52N, X52Q, X52T, X53D, X53E, X53N, X57P, X72A, X76D, X78A, X78D, X78G, X78S, X79I, X86P, X87S, X88V, X89E, X89S, X90P, X91H, X93T, X97G, X99L, X100A, X100K, X101T, X103E, X103S, X104V, X100S, X107T, X107V, X111L, X114A, X114T, X115G, X116E, X116N, X117E, X117S, X18R, X120H, X122A, X123D, X124L, X128A, X128D, X128E, X128H, X128K, X128M, X128N, X128Q, X128S, X128Y, X129D, X129E, X129G, X129H, X129I, X129K, X129L, X129M, X129N, X129P, X129Q, X129R, X129T, X129V, X129Y, X130A, X130E, X130F, X130G, X130H, X130I, X130L, X130M, X130N, X130Q, X130R, X130T, X130V, X130W, X130Y, X131P, X133A, X133D, X133V, X134T, X136E, X139V, X140D, X140Y, X141S, X143T, X144S, X145N, X145W, X147A, X147V, X148L, X149G, X149L, X149N, X149S, X150V, X153S, X156A, X156H, X156N, X158T, X158V, X159D, X159E, X159N, X159Q, X160D, X166A, X166D, X166H, X166N, X166S, X166Y, X181A, X181N, X182E, X185Q, X188Y, X194P, X209F, X209V, X209Y, X212S, X213T, X215D, X215E, X216T, X217L, X217R, X222L, X224T, X228S, X234V, X236N, X236Q, X238F, X240F, X242S, X245A, X245N, X246V, X248K, X248N, X251R, X251S, X252S, X256E, X256K, X256P, X256R, X256Y, X265S, X267N, X271F, X271W, X272K, X272N, X272Q, and X275R; (ii) X1G, X1T, X3E, X3V, X9I, X9T, X9V, X19R, X24R, X24T, X27S, X27T, X30V, X38A, X38Q, X38T, X40D, X40E, X40L, X40V, X43D, X43H, X43L, X43S, X45Q, X45R, X48E, X48Q, X52A, X52N, X52Q, X52T, X53D, X53E, X53N, X57P, X72A, X76D, X78A, X78D, X78G, X78S, X79I, X86P, X87S, X88V, X89E, X89S, X90P, X91H, X93T, X97G, X99L, X100A, X100K, X101T, X103E, X103S, X104V, X106S, X107T, X107V, X111L, X114A, X114T, X115G, X116E, X116N, X117E, X17S, X118R, X120H, X122A, X123D, X124L, X128A, X128D, X128E, X128H, X128K, X128M, X128N, X128Q, X128S, X128Y, X129D, X129E, X129G, X129H, X129I, X129K, X129L, X129M, X129N, X129P, X129Q, X129R, X129T, X129V, X129Y, X130A, X130E, X130F, X130G, X130H, X130I, X130L, X130M, X130N, X130Q, X130R, X130T, X130V, X130W, X130Y, X131P, X133A, X133D, X133V, X134T, X136E, X139V, X140D, X140Y, X141S, X143T, X144S, X145N, X145W, X147A, X147V, X148L, X149G, X149L, X149N, X149S, X150V, X156A, X156H, X156N, X158T, X158V, X159D, X159E, X159N, X159Q, X160D, X166A, X166D, X166H, X166N, X166S, X166Y, X181A, X181N, X182E, X185Q, X188Y, X194P, X209F, X209V, X209Y, X212S, X213T, X215D, X215E, X216T, X217L, X217R, X222L, X224T, X228S, X234V, X236N, X236Q, X238F, X240F, X242S, X245A, X245N, X246V, X248K, X248N, X251R, X251S, X252S, X256E, X256K, X256P, X256R, X256Y, X265S, X267N, X271F, X271W, X272K, X272N, X272Q, and X275R; (iii) X9T, X38Q, X38T, X40D, X45Q, X45R, X48E, X52T, X53D, X53E, X76D, X78A X100A, X114T, X117S, X118R, X128A X128D, X128E, X128H, X128K, X128M, X128N, X128Q, X128S, X128Y, X129D, X129E, X129G, X129H, X129I, X129K, X129L, X129M, X129N, X129Q, X129R, X129T, X129V, X129Y, X130A, X130E, X130F, X130G, X130H, X130I, X130L, X130M, X130N, X130Q, X130R, X130T, X130V, X130W, X130Y, X140D, X147A, X149G, X156N, X158T, X158V, X159D, X159N, X160D, X166D, X166H, X181N, X182E, X194P, X209V, X217R, X234V X236N, X236Q, X245A, X248K, X248N, X256P, X256R, X272K, X272Q, and X275R; (iv) X1G, X1T, X24R, X24T, X30V, X38A, X38Q, X38T, X40D, X40E, X40L, X40V, X48Q, X52A, X52N, X52Q, X52T, X53D, X53E, X53N, X76D, X78A, X78D, X78G, X78S, X79I, X86P, X87S, X88V, X89E, X91H, X93T, X97G, X100A, X100K, X103E, X103S, X104V, X106S, X111L, X114A, X114T, X115G, X116E, X16N X117E X117S, X118R, X120H, X122A X124L X128A, X128D X128E, X128H, X128K, X128M, X128N, X128Q, X128S, X128Y, X129D, X129E, X129G, X129H, X129I, X129K, X129L, X129M, X129N, X129P, X129Q, X129R, X129T, X129V, X129Y, X130F, X130H, X130I, X130Y, X131P, X133A, X133D, X133V, X134T, X136E, X139V, X141S, X143T, X144S, X1147A, X147V, X148L, X149G, X149L, X149N, X149S, X150V, X156A, X1156H, X156N, X158T, X158V, X159D, X159E, X159N, X159Q, X166A, X166D, X166H, X166N, X166S, X166Y, X182E, X185Q, X194P, X209F, X209V, X209Y, X212S, X213T, X216T, X217L, X217R, X222L, X224T, X236N, X236Q, X238F, X248K, X248N, X251R, X251S, X252S, X256E, X256K, X256P, X256R, X256Y, X272K, X272N, X272Q, and X275R: (v) X1G, X1T, X24R, X24T, X30V, X38A, X38Q, X38T, X40D, X40E, X40L, X40V, X52A, X52N, X52Q, X52T, X53D, X53E, X53N, X76D, X78A, X78D, X78G, X78S, X79I, X86P, X87S, X88V, X89E, X93T, X97G, X100A, X100K, X103E, X103S, X104V, X106S, X111L, X114A, X114T, X115G, X116E, X116N, X117E, X117S, X118R, X120H, X122A, X124L, X128A, X128D, X128E, X128H, X128K, X128M, X128N, X128Q, X128S, X128Y, X129D, X129E, X129G, X129H, X129I, X129K, X129L, X129M, X129N, X129P, X129Q, X129R, X129T, X129V, X129Y, X131P, X133A, X133D, X133V, X134T, X136E, X139V, X141S, X143T, X144S, X147A, X147V, X148L, X149G, X149L, X149N, X149S, X150V, X156A, X156H, X156N, X158T, X158V, X1159D, X159E, X159N, X1159Q, X160A, X166D, X166H, X160N, X166S, X166Y, X182E, X185Q, X194P, X209F, X209V, X209Y, X212S, X213T, X216T, X217L, X217R, X222L, X224T, X236N, X236Q, X238F, X248K, X248N, X251R, X251S, X252S, X256E, X256K, X256P, X256R, X256Y, X272K, X272N, X272Q, and X275R; or (vi) X38Q, X40D, X52T, X53E, X76D, X114T, X117S, X118R, X128D, X128M, X129M, X129R, X129V, X130F, X130H, X130I, X130Y, X1147A, X149G, X156N, X158T, X159N, X166D, X166H, X182E, X217R, X248N, X256P, X256R, and X272K; wherein X is any amino acid and the amino acid positions of the variant or recombinant polypeptide or active fragment thereof are numbered by correspondence with the amino acid sequence of SEQ ID NO: 10. Another embodiment is directed to a protease variant, or a recombinant polypeptide or an active fragment thereof comprising an amino acid sequence comprising two or more substitutions selected from: (i) X52T, X53D, X76D, X86P, X97G, X103S, X104V, X106S, X111L, X114A, X115G, X116N, X18R, X120H, X122A-X124L, X128D, X128S, X129F, X130Y, X131P, X134T, X136E, X139V, X141S, X143T, X144S, X147V, X148L, X150V, X156N, X158T, X159D, X166D, X217R, X248N, and X272K; (ii) X53D, X76D, X106S, X128S, X131P, X134T, X139V, X158T, X159D, X166D, X217R, X248N, and X272K; (iii) X52T, X53D, X76D, X106S, X118R X128D, X129F, X130Y, X1131P, X134T, X139V, X156N, X1166D, X217R, X248N, and X272K; (iv) X52T, X53D, X76D, X118R, X128S, X156N, X158T, X166D, X217R, and X248N; (v) X53D, X76D, X128S, X158T, X166D, and X248N; (vi) X52T, X53D, X76D, X118R, X128S, X156N, X158T, X160D, X217R, and X248N; or (vii) X52T-X129F, X53D-X166D, X76D-X166D, X166H-X159D, X166D-X272K, X53D-X76D-X166D, X53D-X118R-X166D, X53D-X166D-X272K, X76D-X118R-X166D, X76D-X166D-X248K, X76D-X166D-X256R, and X76D-X166D-X272K; wherein X is any amino acid and the amino acid positions of the variant or recombinant polypeptide or active fragment thereof are numbered by correspondence with the amino acid sequence of SEQ ID NO: 10.

[0094] An even further embodiment is directed to a protease variant, or a recombinant polypeptide or an active fragment thereof comprising an amino acid sequence comprising two or more substitutions selected from: (i) A001G, A001T, T003E, T003V, G007C, P009I, P009T, P09V, A019R, S024R, S024T, K027S, K027T, I030V, N038A, N038Q, N038T, A040D, A040E, A040L, A040V, N043D, N043H, N043L, N043S, K045Q, K045R, A048E, A048Q, S052A, S052N, S052Q, S052T, G053D, G053E, G053N, A057P, V072A, N076D, T078A, T078D, T0780, T078S, T079I, Y086P, N087S, A088V, D089E, D089S, L090P, Y091H, V093T, S097G, S099L, G100A, G100K, S101T, T103E, T103S, L104V, G106S, I107T, I107V, I111L, S114A, S114T, I115G, S116E, S116N, N17E, N117S, G118R, N120H, I122A, N123D, M124L, G128A, G128D, G128E, G128H, G128K, G128M, G128N, G128Q, G128S, G128Y, S129D, S129E, S129G, S129H, S129I, S129K, S129L, S129M, S129N, S129P, S129Q, S129R, S129T, S129V, S129Y, S130A, S130E, S130F, S300, S130H, S130I, S130L, S130M, S130N, S130Q, S130R, S130T, S130V, S130W, S130Y, G131P, T133A, T133D, T133V, A134T, Q136E, C139V, N140D, N140Y, N141S, Y143T, N144S, R145N, R145W, I147A, I147V, V148L, V149G, V149L, V149N, V149S, I150V, A153S, S156A, S156H, S156N, S158T, S158V, S159D, S159E, S159N, S159Q, G160D, G166A, G166D, G166H, G166N, G166S, G166Y, S181A, S181N, S182E, T185Q, S188Y, S194P, T209F, T209V, T209Y, N212S, N213T, A215D, A215E, S216T, F217L, F217R, M222L, A224T, A228S, I234V, A236N, A236Q, Y238F, S240F, T242S, Q245A, Q245N, I246V, E248K, E248N, K251R, K251S, N252S, N256E, N256K, N256P, N256R, N256Y, K265S, V267N, N269K, V270C, E271F, E271W, S272K, S272N, S272Q, A273V, Q275H, and Q275R; (ii) A001G, A001T, T003E, T003V, P009I, P009T, P009V, A019R, S024R, S024T, K027S, K027T, I030V, N038A, N038Q, N038T, A040D, A040E, A040L, A040V, N043D, N043H, N043L, N043S, K045Q, K045R, A048E, A048Q, S052A, S052N, S052Q, S052T, G053D, G053E, G053N, A057P, V072A, N076D, T078A, T078D, T078G, T078S, T079I, Y086P, N087S, A088V, D089E, D089S, L090P, Y091H, V093T, S097D, S099L, G100A, G100K, S101T, T103E, T103S, L104V, G106S, I107T, I107V, I111L, S114A, S114T, I115G, S116E, S116N, N117E, N117S, G118R, N120H, I122A, N123D, M124L, G128A, G281D, G128E, G128H, G128K, G128M, G128N, G128Q, G128S, G128Y, S129D, S129E, S129G, S129H, S129I, S129K, S129L, S129M, S129N, S129P, S129Q, S129R, S129T, S129V, S129Y, S130A, S130E, S130F, S130G, S130H, S130I, S130L, S130M, S130N, S130Q, S130R, S130T, S130V, S130W, S130Y, G131P, T133A, T133D, T133V, A134T, Q136E, C139V, N140D, N140Y, N141S, Y143T, N144S, R145N, R145W, I147A, I147V, V148L, V149G, V149L, V149N, V149S, I150V, A153S, S156A, S156H, S156N, S158T, S158V, S159D, S159E, S159N, S159Q, G160D, G166A, G166D, G166H, G166N, G166S, G166Y, S181A, S181N, S182E, T185Q, S188Y, S194P, T209F, T209V, T209Y, N212S, N213T, A215D, A215E, S216T, F217L, F217R, M222L, A224T, A228S, I234V, A236N, A236Q, Y238F, S240F, T242S, Q245A, Q245N, I246V, E248K, E248N, K251R, K251S, N252S, N256E, N256K, N256P, N256R, N256Y, K265S, V267N, E271F, E271W, S272K, S272N, S272Q, Q275H, and Q275R; (iii) A001G, G007C, P009T, K027M, N038Q, N038T, A040D, K045Q, K045R, A048E, A048Q, S052F, S052Q, S052T, G053D, G053E, G053Y, N076D, T078A, Y091H, G100A, S114T, N17S, G118R, I122V, G128A, G281D, G128E, G128H, G128K, G128L, G128M, G128N, G128Q, G128R, G128S, G128T, G128V, G128W, G128Y, S129D, S129E, S129F, S129G, S129H, S129I, S129K, S129L, S129M, S129N, S129P, S129Q, S129R, S129T, S129V, S129Y, S130A, S130D, S130E, S130F, S130G, S130H, S130I, S130L, S130M, S130N, S130Q, S130R, S130T, S130V, S130W, S130Y, N140D, I147A, V149G, S156D, S156H, S156N, S156T, S158T, S158V, S159D, S159N, G160D, G166D, G166H, G166Y, S181N, S182E, S194P, T209V, F217R, M222L, Y238F, Q245A, E248D, E248K, E248N, N256E, N256P, N256R, N269K, V270C, E271G, S272K, S272Q, A273V, Q275R, and Q275Y; (iv) A001G, A001T, S024T, I030V, N038Q, A040D, A048Q, S052A, S052Q, S052T, G053D, G053E, N076D, T078D, T078S, T079I, Y086P, N087S, A088V, D089E, D089S, Y091H, V093T, S097G, G100A, T103E, T103S, L104V, G106S, I111L, S114A, S114T, I115G, S116N, N117S, G118R, N120H, I122A, M124L, G128S, S129P, S130F, S130H, S130I, S130Y, G131P, T133A, T133V, A134T, Q136E, C139V, N141S, Y143T, N144S, I147A, I147V, V148L, V149G, V149L, I150V, A153S, S156H, S156N, S158T, S159D, S159N, G166D, G166H, G166S, S182E, T185Q, S194P, T209Y, N212S, N213T, S216T, F217L, F217R, M222L, A224T, A236N, Y238F, E248N, K251S, N252S, N256P, N256R, N256Y, S272K, S272Q, and Q275H; (v) A001G, A001T, S024T, I030V, N038Q, A040D, S052A, S052Q, S052T, G053D, G053E, N076D, T078D, T078S, T079I, Y086P, N087S, A088V, D089E, D089S, V093T, S097G, G100A, T103E, T103S, L104V, G106S, T111L, S114A, S114T, I115G, S116N, N117S, G118R, N120H, I122A, M124L, G128S, S129P, G131P, T133A, T133V, A134T, Q136E, C139V, N141S, Y143T, N144S, I147A, I147V, V148L, V149G, V149L, I150V, A153S, S156H, S156N, S158T, S159D, S159N, G166D, G166H, G166S, S182E, T185Q, S194P, T209Y, N212S, N213T, S216T, F217L, F217R, M222L, A224T, A236N, Y238F, E248N, K251S, N252S, N256P, N256R, N256Y, S272K, S272Q, and Q275H; or (vi) A001G, N038Q, A040D, A048Q, S052F, S052T, G053E, G053Y, N076D, Y091H, S114T, N117S, G118R, G128D, G128M, G128V, S129F, S129M, S129R, S129V, S130F, S130H, S130I, S130Y, I147A, V149G, S156N, S158T, S159N, G166D, G166H, S182E, F217R, Y238F, E248N, N256E, N256P, N256R, and S272K; wherein the amino acid positions of the variant or recombinant polypeptide or active fragment thereof are numbered by correspondence with the amino acid sequence of SEQ ID NO: 10, A still even further embodiment is directed to a protease variant, or a recombinant polypeptide or an active fragment thereof comprising an amino acid sequence comprising two or more substitutions selected from: (i) A001G, A001T, T003E, T003V, P0091, P009T, P009V, A019R, S024R, S024T, K027S, K027T, I030V, N038A, N038Q, N038T, A040D, A040E, A040L, A040V, N043D, N043H, N043L, N043S, K045Q, K045R, A048E, A048Q, S052A, S052N, S052Q, S052T, G053D, G053E, G053N, A057P, V072A, N076D, T078A, T078D, T0780, T078S, T079I, Y086P, N087S, A088V, D089E, D089S, L090P, Y091H, V093T, S097G, S099L, G100A, G100K, S101T, T103E, T103S, L104V, G106S, I107T, I107V, I111L, S114A, S114T, I115G, S116E, S116N, N117E, N117S, G118R, N120H, I122A, N123D, M124L, G128A, G128D, G128E, G128H, G128K, G128M, G128N, G128Q, G128S, G128Y, S129D, S129E, S129G, S129H, S129I, S129K, S129L, S129M, S129N, S129P, S129Q, S129R, S129T, S129V, S129Y, S130A, S130E, S130F, S130G, S130H, S130I, S130L, S130M, S130N, S130Q, S130R, S130T, S130V, S130W, S130Y, G131P, T133A, T133D, T133V, A134T, Q136E, C139V, N140D, N140Y, N141S, Y143T, N144S, R45N, R145W, I147A, I147V, V148L, V149G, V149L, V149N, V149S, I150V, S156A, S156H, S156N, S158T, S158V, S159D, S159E, S159N, S159Q, G160D, G166A, G166D, G166H, G166N, G166S, G166Y, S181A, S181N, S182E, T185Q, S188Y, S194P, T209F, T209V, T209Y, N212S, N213T, A215D, A215E, S216T, F217L, F217R, M222L, A224T, A228S, I234V, A236N, A236Q, Y238F, S240F, T242S, Q245A, Q245N, I246V, E248K, E248N, K251R, K251S, N252S, N256E, N256K, N256P, N256R, N256Y, K265S, V267N, E271F, E271W, S272K, S272N, S272Q, and Q275R; (ii) A001G, A001T, T003E, T003V, P009I, P009T, P009V, A019R, S024R, S024T, K027S, K027T, I030V, N038A, N038Q, N038T, A040D, A040E, A040L, A040V, N043D, N043H, N043L, N043S, K045Q, K045R, A048E, A048Q, S052A, S052N, S052Q, S052T, G053D, G053E, G053N, A057P, V072A, N076D, T078A, T078D, T078G, T078S, T079I, Y086P, N087S, A088V, D089E, D089S, L090P, Y091H, V093T, S097G, S099L, G100A, G100K, S101T, T103E, T103S, L104V, G106S, I071T, I107V, I111L, S114A, S114T, I115G, S116E, S116N, N117E, N117S, G118R, N120H, I122A, N123D, M124L, G128A, G128D, G128E, G128H, G128K, G128M, G128N, G128Q, G128S, G128Y, S129D, S129E, S129G, S129H, S129I, S129K, S129L, S129M, S129N, S129P, S129Q, S129R, S129T, S129V, S129Y, S130A, S130E, S130F, S130G, S130H, S130I, S130L, S130M, S130N, S130Q, S130R, S130T, S130V, S130W, S130Y, G131P, T133A, T133D, T133V, A134T, Q136E, C139V, N140D, N140Y, N141S, Y143T, N144S, R145N, R145W, I147A, I147V, V148L, V149G, V149L, V149N, V149S, I150V, S156A, S156H, S156N, S158T, S158V, S159D, S159E, S159N, S159Q, G160D, G166A, G166D, G166H, G166N, G166S, G166Y, S181A, S181N, S182E, T185Q, S188Y, S194P, T209F, T209V, T209Y, N212S, N213T, A215D, A215E, S216T, F217L, F217R, M222L, A224T, A228S, I234V, A236N, A236Q, Y238F, S240F, T242S, Q245A, Q245N, I246V, E248K, E248N, K251R, K251S, N252S, N256E, N256K, N256P, N256R, N256Y, K265S, V267N, E271F, E271W, S272K, S272N, S272Q, and Q275R; (iii) P009T, N038Q, A040D, K045Q, K045R, A048E S052T, G053D, G053E, N076D, T078A, G100A, S114T, N117S, G118R, G128A, G128D, G128E, G128H, G128K, G128M, G128N, G128Q, G128S, G128Y, S129D, S129E, S129G, S129H, S129I, S129K, S129L, S129M, S129N, S129Q, S129R, S129T, S129V, S129Y, S130A, S130E, S130F, S130G, S130H, S130I, S130L, S130M, S130N, S130Q, S130R, S130T, S130V, S130W, S130Y, N140D, I147A, V149G, S156N, S158T, S158V, S159D, S159N, G160D, G166D, G166H, S181N, S182E, S194P, T209V, F217R, Q245A, E248K, E248N, N256P, N256R, S272K, S272Q, and Q275R; (iv) A001G, A001T, S024T, I030V, N038Q, A040D, A048Q, S052A, S052Q, S052T, G053D, G053E, N076D, T078D, T078S, T079I, Y086P, N087S, A088V, D089E, D089S, Y091H, V093T, S097G, G100A, T103E, T103S, L104V, G106S, I111L, S114A, S114T, I115G, S116N, N117S, G118R, N120H, I122A, M124L, G128S, S129P, S130F, S130H, S130I, S130Y, G131P, T133A, T133V, A134T, Q136E, C139V, N141S, Y143T, N144S, I147A, I147V, V148L, V149G, V149L, I150V, S156H, S156N, S158T, S159D, S159N, G166D, G166H, G166S, S182E, T185Q, S194P, T209Y, N212S, N213T, S216T, F217L, F217R, M222L, A224T, A236N, Y238F, E248N, K251S, N252S, N256P, N256R, N256Y, S272K, S272Q, and Q275H; (v) A001G, A001T, S024T, I030V, N038Q, A040D, S052A, S052Q, S052T, G053D, G053E, N076D, T078D, T078S, T079I, Y086P, N087S, A088V, D089E, D089S, V093T, S097G, G100A, T103E, T003S, L104V, G106S, I111L, S114A, S114T, I115G, S116N, N117S, G118R, N120H, I122A, M124L, G128S, S129P, G131P, T133A, T133V, A134T, Q136E, C139V, N141S, Y143T, N144S, I147A, I147V, V148L, V149G, V149L, I150V, S156H, S156N, S158T, S159D, S159N, G166D, G166H, G166S, S182E, T185Q, S194P, T209Y, N212S, N213T, S216T, F217L, F217R, M222L, A224T, A236N, Y238F, E248N, K251S, N252S, N256P, N256R, N256Y, S272K, S272Q, and Q275H; or (vi) N038Q, A040D, S052T, G053E, N076D, S114T, N117S, G118R, G128D, G128M, S129M, S129R, S129V, S130F, S130H, S130I, S130Y, I147A, V149G, S156N, S158T, S159N, G166D, G166H, S182E, F217R, E248N, N256P, N256R, and S272K; wherein the amino acid positions of the variant or recombinant polypeptide or active fragment thereof are numbered by correspondence with the amino acid sequence of SEQ ID NO: 10, A still further embodiment is directed to a protease variant, or a recombinant polypeptide or an active fragment thereof comprising an amino acid sequence comprising two or more substitutions selected from: (i) S52T, G53D, N76D, Y086P, S097G, T103S, L104V, G106S, I111L, S114A, I115G, S116N, G118R, N120H, I122A, M124L, G128D, G128S, S129F, S129P, S130Y, G131P, A134T, Q136E, C139V, N141S, Y143T, N144S, I147V, V148L, I150V, S156N, S158T, S159D, G166D, F217R, E248N, and S272K; (ii) G53D, N76D, G106S, G128S, G131P, A134T, C139V, S158T, S159D, G166D, F217R, E248N, and S272K; (iii) S52T, G53D, N76D, G106S, G118R G128D, S129F, S130Y, G131P, A134T, C139V, S156N, G166D, F217R, E248N, and S272K: (iv) S52T, G53D, N76D, G118R, G128S, S156N, S158T, G166D, F217R, and E248N; (v) G53D, N76D, G128S, S158T, G166D, and E248N; (vi) S52T, G53D, N76D, G118R, S156N, S158T, G166D, F217R, and E248N; or (vii) S52T-S29F, G53D-G166D, N76D-G166D, G66H-S159D, G166D-S272K, G53D-N76D-G166D, G53D-G118R-G166D, G53D-G166D-S272K, N76D-G118R-G166D, N76D-G166D-E248K, N76D-G166D-N256R, and N76D-G166D-S272K: wherein the amino acid positions of the variant or recombinant polypeptide or active fragment thereof are numbered by correspondence with the amino acid sequence of SEQ ID NO: 10.

[0095] As used herein, a LG12-clade protease enzyme includes an enzyme, polypeptide, or protein, or an active fragment thereof, exhibiting a proteolytic activity. This includes members of the LG12-clade, as described in the Examples, alignments shown in FIGS. 1A-1B, 4A-4F, and FIGS. 10A-10F and/or the phylogenetic tree of FIGS. 5 and/or 11. Members of the LG12-clade were identified by selecting subtilisin molecules with close homology to LG12 SprC, generating a structure-based alignment of these sequences to other subtilisins, and identifying regions of unique sequences conserved for all the LG12-clade enzymes. One embodiment is directed to an LG12-Clade of subtilisins comprising one or more protease variants described herein, or recombinant polypeptide or an active fragment thereof. In some embodiments, the LG12 enzyme clade comprises subtilisin proteases where the parent, wild-type and/or protease variant sequence contains one or more of the following amino acid motifs: a catalytic triad comprising a Ser221, His64, and Asp32 motif and an EPNALQDGNGHGTH (SEQ ID NO:44) motif. In a further embodiment, the protease variant, or recombinant polypeptide or active fragment thereof comprises an EPNALQDGNGHGTH (SEQ ID NO:44) motif. In a still further embodiment, the protease variant, or recombinant polypeptide or active fragment thereof comprises an EPNALQDGNGHGTH (SEQ ID NO:44) motif, with the proviso that the variant or recombinant polypeptide or active fragment thereof does not comprise WP_047970940, WP_010192403, KPB_03414, BAD11988, BAD21128. Bhon03321, DSM9712_SprC. DSM6951_SprC, or DSM9711_SprC. In another embodiment, the motif extends from residue E54 to H67, wherein the amino acid positions of the motif are numbered by correspondence with the amino acid sequence of LG12 wild-type set forth in SEQ ID NO:10. Any LG12-clade protease enzyme sequence can be used as a parent sequence for generation of variant subtilisin enzymes of the present invention. In one embodiment, the protease variant, or recombinant polypeptide or active fragment thereof is derived from a reference polypeptide selected from SEQ ID NOs:10, 18, 19, 45, 46, 57, 58, and 66. In another embodiment, the protease variant, or recombinant polypeptide or active fragment thereof is derived from a reference polypeptide selected from SEQ ID NO: 10. In another embodiment, the protease variant, or recombinant polypeptide or active fragment thereof is derived from a reference polypeptide selected from SEQ ID NOs:10 and said protease variant, or recombinant polypeptide or active fragment thereof has one or more substitutions in one or more molecular segments selected from Segment 1 comprising positions 76-79 and 86. Segment 2 comprising positions 97-148, Segment 3 comprising positions 150-170, and Segment 4 comprising positions 207-220. Members of the LG12-clade were confirmed to cluster to the same branching points in a phylogentic tree created using the Neighbor Joining method (Saitou, N, and Nei, M. (1987) Mol. Biol. Evol. 4:406-425).

[0096] In some embodiments, the sequence identity for the LG12-clade includes enzymes that are at least 60%, 65%, 70%, 75%, 80%, 85%, 90%, 91%, 92%, 93%, 94%, 95%, 96%, 97%, 98%, 99% or 100% identical to the LG12 SprC sequence (SEQ ID NO:10). In other embodiments, the protease variant, or recombinant polypeptide or active fragment thereof comprises an amino acid sequence having at least 75, 80, 85, 90, 95, 96, 97, 98, or 99% amino acid sequence identity to SEQ ID NO:10. In yet other embodiments, the protease variant, or recombinant polypeptide or active fragment thereof comprises an amino acid sequence having at least 75% amino acid sequence identity to SEQ ID NO: 10, with the proviso that the variant or recombinant polypeptide or active fragment thereof does not comprise WP_047970940. WP_010192403. KPB_03414, BAD11988, BAD21128, Bhon03321, DSM9712_SprC, DSM6951_SprC, or DSM9711_SprC. In a still further embodiment, the protease variant, or recombinant polypeptide or active fragment thereof comprises an amino acid sequence having at least 80% amino acid sequence identity to SEQ ID NO: 10, with the proviso that the variant or recombinant polypeptide or active fragment thereof does not comprise WP_047970940, WP_010192403, KPB_03414, Bhon03321, DSM9712_SprC. DSM6951_SprC, or DSM9711_SprC. In an even still further embodiment, the protease variant, or recombinant polypeptide or active fragment thereof comprises an amino acid sequence having at least 95% amino acid sequence identity to SEQ ID NO: 10, with the proviso that the variant or recombinant polypeptide or active fragment thereof does not comprise Bhon03321, DSM9712_SprC, or DSM6951_SprC.

[0097] The serine protease polypeptides of the present disclosure include isolated, recombinant, substantially pure, or non-naturally occurring polypeptides. In some embodiments, the polypeptides are useful in cleaning applications and can be incorporated into cleaning compositions that are useful in methods of cleaning an item or a surface in need thereof.

[0098] In some embodiments, the polypeptide has a specified degree of amino acid sequence homology to an LG12-clade protease variant disclosed herein. In some embodiments, an LG12-clade protease variant has 70%, 71%, 72%, 73%, 74%, 75%, 76%, 77%, 78%, 79%, 80%, 81%, 82%, 83%, 84%, 85%. 86%, 87%, 88%, 89%, 90%, 91%, 92%, 93%, 94%, 95%, 96%, 97%, 98%, 99% or 100% sequence identity to an amino acid sequence selected from SEQ ID NO:1, 3, 4, 5, 6, 7, 8, 29, 30, 31, 32, 33, 34, 35, 36, 37, 38, 39, 40, 41, 42, and 43. In further embodiments, an LG12-clade protease variant has 70%. 75%, 80%, 85%, 90%, 95%, 96%, 97%, 98%, 99% or 100% sequence identity to an amino acid sequence selected from SEQ ID NO:1, 3, 4, 5, 6, 7, 8, 29, 30, 31, 32, 33, 34, 35, 36, 37, 38, 39, 40, 41, 42, and 43. In another embodiment, an isolated, recombinant, substantially pure, or non-naturally occurring LG12-clade protease variant has protease activity and comprises a polypeptide sequence having at least about 60%, at least about 65%, at least about 70%, at least about 75%, at least about 76%, at least about 77%, at least about 78%, at least about 79%, at least about 80%, at least about 81%, at least about 82%, at least about 83%, at least about 84%, at least about 85%, at least about 86%, at least about 87%, at least about 88%, at least about 89%, at least about 90%, at least about 91%, at least about 92%, at least about 93%, at least about 94%, at least about 95%, at least about 96%, at least about 97%, at least about 98%, at least about 99%, at least about 99.5%, or 100% sequence identity to an amino acid sequence selected from SEQ ID NO:1, 3, 4, 5, 6, 7, 8, 29, 30, 31, 32, 33, 34, 35, 36, 37, 38, 39, 40, 41, 42, and 43. In a still further embodiment, an LG12-clade protease variant is selected from SEQ ID NO:1, 3, 4, 5, 6, 7, 8, 29, 30, 31, 32, 33, 34, 35, 36, 37, 38, 39, 40, 41, 42, and 43.

[0099] Homology can be determined by amino acid sequence alignment, e.g., using a program such as BLAST. ALIGN, or CLUSTAL, as described herein. In some embodiments, the polypeptide is an isolated, recombinant, substantially pure, or non-naturally occurring enzyme having protease activity, such as subtilisin activity, or casein hydrolysis activity (for example, dimethylcasein hydrolysis activity).

[0100] Also provided is an LG12-clade protease variant having protease activity, such as alkaline protease activity, said variant comprising an amino acid sequence which differs from the amino acid sequence of SEQ ID NOs: 1, 3, 4, 5, 6, 7, 8, 29, 30, 31, 32, 33, 34, 35, 36, 37, 38, 39, 40, 41, 42, or 43 by no more than 50, no more than 45, no more than 40, no more than 35, no more than 30, no more than 25, no more than 20, no more than 19, no more than 18, no more than 17, no more than 16, no more than 15, no more than 14, no more than 13, no more than 12, no more than 11, no more than 10, no more than 9, no more than 6, no more than 5, no more than 4, no more than 3, no more than 2 amino acid residues, or no more than 1 amino acid residue(s), as determined by alignment of the variant protease amino acid sequence with the LG12-clade wild-type amino acid sequence.

[0101] In another embodiment, a protease variant described herein, or recombinant polypeptide or active fragment thereof has one or more improved property selected from improved cleaning performance, improved stability, and improved residual protease activity when compared to SEQ ID NO: 10 and/or 48. In another embodiment, the improved property is (i) improved residual protease activity and said protease variant, or recombinant polypeptide or active fragment thereof has 15-100%, 20-100%, 25-100%, 30-100%, 35-100%, or 40-100% residual protease activity when measured in accordance with the Stability Assay of Example 1; (ii) improved cleaning performance and said protease variant, or recombinant polypeptide or active fragment thereof has a BMI cleaning PI of ≥0.7 in comparison to SEQ ID NO:48 when measured in accordance with the Cleaning Performance in Detergent assay of Example 1: (iii) improved stability and said protease variant, or recombinant polypeptide or active fragment thereof has a stability PI≥1.01 or 1.1 or 1.2 in comparison to SEQ ID NO:10 when measured in accordance with the Stability Assay of Example 1; and/or (iv) improved cleaning performance and said protease variant, or recombinant polypeptide or active fragment thereof has a cleaning PI≥1.01 or 1.1 or 1.2 in comparison to SEQ ID NO:10 when measured in accordance with the Cleaning Performance in Detergent Assay of Example 1.

[0102] In some embodiments, one or more LG12-clade protease variants has at least one beneficial mutation compared to the parent and/or BPN′-Y217L, wherein the benefit can be any one or more of the following: % residual protease activity in 10% HDL non-boron detergent (e.g., Persil non-bio HDL and Test HDL) that is greater than BPN′-Y217L; % residual protease activity in 10% HDL non-boron detergent (e.g., Persil non-bio HDL and Test HDL) that is 5-10 fold greater than BPN′-Y217L, laundry stability PI>1.01 over LG12 wild-type protease in 10% OMO HDL pH 8.2 at 51° C. and/or LAS/EDTA at 53.5° C.; laundry stability PI>0.75 over LG12 wild-type in 10% Kirkland HDL pH 8.2 at 56° C.; HDD cleaning PI>1.01 over LG12 wild-type protease in Kirkland Ultra HDD pH 10.6, OMO Color HDD pH 10.6, and/or Surf Excel HDD pH 10.6; or HDL cleaning PI>1.01 over LG12 wild-type in OMO HDL pH 8.2 and/or Kirkland ultraclean pH 8.2. In still other embodiments, one or more LG12-clade protease variants has at least one beneficial mutation compared to the parent and/or BPN′-Y217L, wherein the benefit can be any one or more of the following: laundry stability PI and laundry cleaning PI>1.01 over LG12 wild-type protease in all Example 1 stability and cleaning performance assays; ADW cleaning PI>1.01 over LG12 wild-type protease in GSM-B detergent pH10.5; ADW stability PI>1.01 in buffer and ADW cleaning PI>1.01 over LG12 wild-type protease in GSM-B detergent pH 10.5

[0103] In yet a further embodiment, the protease variant described herein, or recombinant polypeptide or active fragment thereof has protease activity in the presence of a surfactant, cleaning activity in a detergent composition, or a combination thereof. In still yet a further embodiment, the protease variant described herein, or recombinant polypeptide or active fragment thereof has protease activity in the presence of a surfactant, cleaning activity in a detergent composition, or a combination thereof, wherein the detergent composition is an automatic dish washing detergent or a laundry detergent. In an even still yet a further embodiment, the protease variant described herein, or recombinant polypeptide or active fragment thereof has protease activity in the presence of a surfactant, cleaning activity in a detergent composition, or a combination thereof, wherein the cleaning activity comprises hydrolysis of a protein stain. In another embodiment the protein stains is selected from egg yolk, blood, milk, ink, oil, and pigment.

[0104] In yet still an even further embodiment, the composition described herein contains phosphate, is phosphate-free, contains borate, is boron-free, or combinations thereof. In other embodiments, the composition is a boron-free composition. In some embodiments, a boron-free composition is a composition to which a borate stabilizer has not been added. In another embodiment, a boron-free composition is a composition that contains less than 5.5% boron. In a still further embodiment, a boron-free composition is a composition that contains less than 4.5% boron. In yet still another embodiment, a boron-free composition is a composition that contains less than 3.5% boron. In yet still further embodiments, a boron-free composition is a composition that contains less than 2.5% boron. In even further embodiments, a boron-free composition is a composition that contains less than 1.5% boron. In another embodiment, a boron-free composition is a composition that contains less than 1.0% boron. In still further embodiments, a boron-free composition is a composition that contains less than 0.5% boron. In other embodiments, the composition is a cleaning composition. In yet further embodiments, the cleaning composition is a detergent composition. In still further embodiments, a boron-free composition is a composition substantially-free of boron.

[0105] In another embodiment, an LG12-clade enzyme variant or an active fragment thereof contains at least two, three, four, five, six, seven, eight, nine or ten or more amino acid modifications to a parent LG12-clade enzyme, wherein a first amino acid modification is at a position of the enzyme variant selected from 52, 53, 76, 78, 79, 86, 97, 103, 104, 106, 111, 114, 115, 116, 118, 120, 122, 124, 128, 129, 130, 131, 134, 136, 139, 141, 143, 144, 147, 148, 149, 150, 156, 158, 159, 166, 217, 248, 256, and 272, wherein the amino acid positions of the variant are numbered by correspondence with the amino acid sequence of LG12 wild-type set forth in SEQ ID NO: 10.

[0106] In another embodiment, a LG2-clade enzyme variant or an active fragment thereof contains at least two, three, four, five, six, seven, eight, nine or ten or more amino acid modifications to a parent LG12-clade enzyme, wherein a first amino acid modification is at a position of the enzyme variant selected from 76, 78, 79, 86, 97, 103, 104, 106, 111, 114, 115, 116, 120, 122, 124, 128, 129, 131, 134, 136, 139, 141, 143, 144, 147, 148, 150, 158, 166, 217 and 248, wherein the amino acid positions of the variant are numbered by correspondence with the amino acid sequence of LG12 wild-type set forth in SEQ ID NO: 10.

[0107] In another embodiment, a LG12-clade enzyme variant or an active fragment thereof contains at least two, three, four, five, six, seven, eight, nine or ten or more amino acid modifications to a parent LG12-clade enzyme, wherein a first amino acid modification is at a position of the enzyme variant selected from 52, 53, 118, 129, 130, 149, 156, 159, 166, 248, 256, and 272, wherein the amino acid positions of the variant are numbered by correspondence with the amino acid sequence of LG12 wild-type set forth in SEQ ID NO:10.

[0108] In another embodiment, a LG2-clade enzyme variant or an active fragment thereof contains amino acid modifications to a parent LG12-clade enzyme, wherein said enzyme variant comprises amino acid modifications at positions 76 and 217 in combination with at least one amino acid modification selected from 52, 53, 118, 129, 130, 149, 156, 159, 166, 248, 256, and 272, wherein the amino acid positions of the variant are numbered by correspondence with the amino acid sequence of LG12 wild-type set forth in SEQ ID NO:10.

[0109] In another embodiment, a LG2-clade enzyme variant or an active fragment thereof contains amino acid modifications to a parent LG12-clade enzyme, wherein said enzyme variant comprises amino acid modifications at positions 76 and 166 in combination with at least one amino acid modification selected from 52, 53, 118, 129, 130, 149, 156, 159, 217, 248, 256, and 272, wherein the amino acid positions of the variant are numbered by correspondence with the amino acid sequence of LG12 wild-type set forth in SEQ ID NO: 10.

[0110] In another embodiment, a LG12-clade enzyme variant or an active fragment thereof contains at least two, three, four, five, six, seven, eight, nine or ten or more amino acid modifications to a parent LG12-clade enzyme, wherein a first amino acid modification is at a position of the enzyme variant selected from N76D, T78S, T79I, Y86P, S97G, T003S, L104V, G106S, I111L, S114A. I115G, S116N, N120H, I122A. M124L. G128S, G129P, G131P. A134T, Q136E, C139V. N141S, Y143T, N144S, I147V, V148L, I150V, S158T, G166D. F217L and E248N, wherein the amino acid positions of the variant are numbered by correspondence with the amino acid sequence of LG12 wild-type set forth in SEQ ID NO: 10.

[0111] An even still further embodiment is directed to a protease variant, or a recombinant polypeptide or an active fragment thereof comprising an amino acid sequence comprising one or more deletions at one or more positions selected from 53, 55, 56, 57, and 58 or G053, P055, N056, A057 and L058; wherein the amino acid positions of the variant, or recombinant polypeptide or active fragment thereof are numbered by correspondence with the amino acid sequence of SEQ ID NO: 10.

[0112] In another embodiment, a LG12-clade enzyme variant or an active fragment thereof contains at least one, two, or three or more amino acid modifications to a parent LG12-clade enzyme, wherein a first amino acid modification is a deletion at a position of the enzyme variant selected from 53, 54, 55, 56, 57, and 58, wherein the amino acid positions of the variant are numbered by correspondence with the amino acid sequence of LG12 wild-type set forth in SEQ ID NO:10.

[0113] In another embodiment, a LG12-clade enzyme variant or an active fragment thereof contains at least two, three or more amino acid modifications to a parent LG12-clade enzyme, wherein an amino acid modification is a deletion of two or more positions of the enzyme variant selected from 53, 54, 55, 56, 57, and 58, wherein the amino acid positions of the variant are numbered by correspondence with the amino acid sequence of LG12 wild-type set forth in SEQ ID NO:10.

[0114] In another embodiment, a LG12-clade enzyme variant or an active fragment thereof contains at least three or more amino acid modifications to a parent LG12-clade enzyme, wherein an amino acid modification is a deletion of three or more positions of the enzyme variant selected from 53, 54, 55, 56, 57, and 58, wherein the amino acid positions of the variant are numbered by correspondence with the amino acid sequence of LG12 wild-type set forth in SEQ ID NO:10.

[0115] In a still further embodiment, the protease variant, or recombinant polypeptide or active fragment thereof comprises an amino acid sequence comprising two or more substitutions selected from S052T-S129F: G053D-G166D; N076D-G166D; G166H-S159D; G166D-S272K; G053D-N076D-G166D: G053D-G118R-G166D; G053D-G166D-S272K; N076D-G118R-G166D; N076D-G166D-E248K; N076D-G166D-N256R; N076D-G166D-S272K; [S024T-G053E-G166D-M222L-N256P: V149L-S156H-T185Q-S272Q-S-S159D: G053D-N076D-G118R-G166D-N256R: S052T-V149G-S156N-G166H-F217R; S052T-V149G-S156N-G166D-F217R: S052T-V49G-S156N-S159D-G166D-F217R; S052T-V149G-S156N-G166D-S182E-F217R; A040D-S114T-I147A-S159N-G166D-S182E; N038Q-G053E-G100A-N117S-I147A-S158T-G166D-S272K; N038Q-G053E-N117S-I147A-S158T-G166D-N256P-S272K; A001G-S052Q-V149G-S156N-S159N-S182E-Y238F-S272Q: A001G-S052Q-S114T-S156N-S159N-S182E-Y238F-S272Q; N038Q-G053E-G100A-N117S-I147A-S158T-G166D-N256P-S272K; A001G-I030V-T078D-V093T-T103E-S156N-S159D-G166S-S194P-F217R-A236N; A001T-N076D-T078S-T079I-Y086P-D089E-S097G-T103S-L104V-G06S-I111L-S114A-I115G-S116N-N120H-I122A-M124L-G128S-S129P-G131P-T133A-A134T-Q136E-C139V-N141S-Y143T-N144S-I147V-V148L-I150V-S158T-G166D-E248N; S052A-N076D-T078S-T079I-Y086P-D089E-S097G-T103S-L104V-G106S-I111L-S114A-I115G-S116N-N120H-I122A-M124L-G128S-S129P-G131P-T133V-A134T-Q136E-C139V-N141S-Y143T-N144S-I147V-V148L-I150V-S158T-G166D-F217L-E248N; A001T-N076D-T078S-T079I-Y086P-D089E-S097G-T103S-L104V-G106S-I111L-S114A-I115G-S116N-N120H-I122A-M124L-G128S-S129P-G131P-T133V-A134T-Q136E-C139V-N141S-Y143T-N144S-I147V-V148L-I150V-S158T-G166D-T209Y-N212S-N213T-S216T-F217L-A224T-E248N-K251S-N252S-N256Y; N076D-T078S-T079I-Y086P-D089E-S097G-T103S-L104V-G106S-I111L-S114A-I115G-S116N-N120H-I122A-M124L-G128S-S129P-G131P-T33A-A134T-Q136E-C139V-N141S-Y143T-N144S-I147V-V148L-I150V-S158T-G166D-T209Y-N212S-N213T-S216T-F217L-A224T-E248N; N076D-T078S-T079I-Y086P-N087S-A088V-D089S-S097G-T103S-L104V-G106S-I111L-S114A-I115G-S116N-N120H-I122A-M24L-G128S-S129P-G131P-T133A-A134T-Q136E-C139V-N141S-Y143T-N144S-I147V-V148L-I150V-S158T-G166D-F217L-E248N: A001T-N076D-T078S-T079I-Y086P-D089E-S097G-T103S-L104V-G106S-I111L-S114A-I115G-S116N-N120H-I122A-M124L-G128S-S129P-31P-T133A-A134T-Q136E-C39V-N141S-Y143T-N144S-S147V-V148L-I50V-S158T-G166D-T209Y-N212S-N213T-S216T-F217L-A224T-E248N: A001T-N076D-T078S-T079I-Y086P-N087S-A088V-D089S-S097G-T103S-L104V-G106S-I111L-S114A-I115G-S116N-N120H-I122A-M124L-G128S-S129P-G131P-T133A-A134T-Q136E-C139V-N141S-Y143T-N144S-I147V-V148L-I150V-S158T-G166D-T209Y-N212S-N213T-S216T-F217L-E248N; S052A-N076D-T078S-T079I-Y086P-A088V-D089S-S097G-T103S-L104V-G106S-I111L-S114A-I115G-S116N-N120H-I122A-M124L-G128S-S129P-G131P-T133A-A134T-Q136E-C139V-N141S-Y143T-N144S-I147V-V148L-I150V-S158T-G166D-F217L-A224T-E248N; S052A-N076D-Y086P-N087S-A088V-D089S-S097G-T103S-L104V-G106S-I111L-S114A-I115G-S116N-N120H-I122A-M124L-G128S-S129P-G131P-T133A-A134T-Q136E-C139V-N141S-Y143T-N144S-I147V-V148L-I150V-S158T-G166D-T209Y-N212S-N213T-S216T-F217L-A224T-E248N: A001T-N076D-T078S-T079I-Y086P-D089E-S097G-T103S-L104V-G106S-I111L-S114A-I115G-S16N-N120H-I122A-M124L-G128S-S129P-G131P-T133A-A134T-Q136E-C139V-N141S-Y143T-N144S-I147V-V148L-I150V-S158T-G166D-T209Y-N212S-N213T-S216T-F217L-E248N: A001T-S052A-N076D-Y086P-N087S-A088V-D089S-S097G-T103S-L104V-G106S-I111L-S114A-I115G-S116N-N120H-I122A-M124L-G128S-S129P-G131P-T133A-A134T-Q136E-C139V-N141S-Y143T-N144S-I147V-V148L-I150V-A153S-S158T-G166D-T209Y-N212S-N213T-S216T-F217L-A224T-E248N; A001T-N076D-Y086P-N087S-A088V-D089S-S097G-T103S-L104V-G106S-I111L-S114A-I115G-S16N-N120H-I122A-M124L-G128S-S129P-G131P-T133A-A134T-Q136E-C139V-N141S-Y143T-N144S-I147V-V148L-I150V-A153S-S158T-G166D-T209Y-N212S-N213T-S216T-F217L-A224T-E248N; A001T-N076D-Y086P-N087S-A088V-D089S-S097G-T103S-L104V-G06S-I111L-S114A-I115G-S116N-N120H-I22A-M124L-G128S-S129P-G131P-T133A-A134T-Q136E-C139V-N141S-Y143T-N144S-I147V-V148L-I150V-S158T-G166D-T209Y-N212S-N213T-S216T-F217L-A224T-E248N-Q275H; A001T-N076D-T078S-T079I-Y086P-N087S-A088V-D089S-S097G-T103S-L104V-G106S-I111L-S114A-I115G-S116N-N120H-I122A-M124L-G128S-S129P-G131P-T33A-A134T-Q136E-C139V-N141S-Y143T-N144S-I147V-V148L-I150V-S158T-G166D-T209Y-N212S-N213T-S216T-F217L-A224T-E248N; N076D-G118R-G28D-S129R-S130I-G166D-E248N; N076D-G118R-G128D-S129F-S130Y-G166D-E248N; N076D-G118R-G128V-S129M-S130H-G166D-E248N; S052T-N076D-G118R-G128M-S129V-S130F-G166H-Y238F; S052T-N076D-G118R-G128D-S129R-S130I-G166D-F217R-N256R; S052T-N076D-G118R-G128V-S129M-S130H-G166D-E248N-N256E-S272K; S052F-G053Y-N076D-G118R-G128D-S129F-S130Y-G166D-F217R-E248N-N256R-S272K; and A001G-A040D-A048Q-S052T-G053E-Y091H-S14T-I147A-S156N-S159N-G166H-S182E-Y238F; wherein the amino acid positions of the variant or recombinant polypeptide or active fragment thereof are numbered by correspondence with the amino acid sequence of SEQ ID NO: 10.

[0116] In an even still further embodiment, the protease variant, or recombinant polypeptide or active fragment thereof comprises an amino acid sequence comprising two or more substitutions selected from S052T-S129F; G053D-G166D; N076D-G166D: G166H-S159D; G166D-S272K; G053D-N076D-G166D: G053D-G118R-G166D; G053D-G166D-S272K; N076D-G118R-G166D; N076D-G166D-E248K; N076D-G166D-N256R; N076D-G166D-S272K; S024T-G053E-G166D-M222L-N256P; V149L-S156H-T185Q-S272Q-S159D; G053D-N076D-G118R-G166D-N256R; S052T-V149G-S156N-G166H-F217R; S052T-V149G-S156N-G166D-F217R: S052T-V149G-S156N-S159D-G166D-F217R; S052T-V149G-S156N-G166D-S182E-F217R; A040D-S114T-I147A-S159N-G166D-S182E; N038Q-G053E-G100A-N117S-I147A-S158T-G166D-S272K; N038Q-G053E-N17S-I147A-S158T-G166D-N256P-S272K; A001G-S052Q-V149G-S156N-S159N-S182E-Y238F-S272Q: A01G-S052Q-S114T-S156N-S159N-S182E-Y238F-S272Q; N038Q-G053E-G100A-N117S-I147A-S158T-G166D-N256P-S272K; A001G-I030V-T078D-V093T-T103E-S156N-S159D-G166S-S194P-F217R-A236N; A001T-N076D-T078S-T079I-Y086P-D089E-S097G-T103S-L104V-G06S-I111L-S114A-I115G-S16N-N120H-I122A-M124L-G128S-S129P-G131P-T133A-A134T-Q136E-C139V-N141S-Y143T-N144S-I147V-V148L-I150V-S158T-G166D-E248N; S052A-N076D-T078S-T079I-Y086P-D089E-S197G-T103S-L104V-G106S-I111L-S114A-I115G-S16N-N120H-I122A-M124L-G128S-S129P-G131P-T133V-A134T-Q136E-C139V-N141S-Y143T-N144S-I147V-V148L-I150V-S158T-G166D-F217L-E248N; A001T-N076D-T078S-T079I-Y086P-D089E-S097G-T103S-L104V-G106S-I111L-S114A-I115G-S116N-N120H-I122A-M24L-G28S-S129P-G131P-T33V-A134T-Q136E-C139V-N141S-Y143T-N144S-I147V-V148L-I150V-S158T-G166D-T209Y-N212S-N213T-S216T-F217L-A224T-E248N-K251S-N252S-N256Y; N076D-T078S-T079I-Y086P-D089E-S097G-T103S-L104V-G106S-I111L-S114A-I115G-S16N-N120H-I122A-M124L-G128S-S129P-G131P-T133A-A134T-Q136E-C139V-N141S-Y143T-N144S-I147V-V148L-I150V-S158T-G166D-T209Y-N212S-N213T-S216T-F217L-A224T-E248N; N076D-T078S-T079I-Y086P-N087S-A088V-D089S-S097G-T103S-L104V-G106S-I111L-S114A-I115G-S116N-N120H-I122A-M124L-G128S-S129P-G131P-T133A-A134T-Q136E-C139V-N141S-Y143T-N144S-I147V-V148L-I150V-S158T-G166D-F217L-E248N: A001T-N076D-T078S-T079I-Y086P-D089E-S097G-T103S-L104V-G106S-I111L-S114A-I115G-S116N-N120H-I122A-M124L-G128S-S129P-G131P-T133A-A134T-Q136E-C139V-N141S-Y143T-N144S-I147V-V148L-I150V-S158T-G166D-T209Y-N212S-N213T-S216T-F217L-A224T-E248N; A001T-N076D-T078S-T079I-Y086P-N087S-A088V-D089S-S097G-T103S-L104V-G106S-I11l L-S114A-I115G-S116N-N120H-I122A-M124L-G128S-S129P-G131P-T133A-A134T-Q136E-C139V-N141S-Y143T-N144S-I147V-V148L-I150V-S158T-G166D-T209Y-N212S-N213T-S216T-F217L-E248N; and N076D-G118R-G128D-S129R-S130I-G166D-E248N; wherein the amino acid positions of the variant or recombinant polypeptide or active fragment thereof are numbered by correspondence with the amino acid sequence of SEQ ID NO:10.

[0117] In yet another embodiment, the protease variant, or recombinant polypeptide or active fragment thereof comprises an amino acid sequence comprising two or more substitutions selected from S052A-N076D-T078S-T079I-Y086P-A088V-D089S-S097G-T103S-L104V-G106S-I111L-S114A-I115G-S116N-N120H-I122A-M124L-G128S-S129P-G131P-T133A-A134T-Q136E-C139V-N141S-Y143T-N144S-I147V-V148L-I150V-S158T-G166D-F217L-A224T-E248N; S052A-N076D-Y086P-N087S-A088V-D089S-S097G-T103S-L104V-G106S-I111L-S114A-I115G-S116N-N120H-I122A-M124L-G128S-S129P-G131P-T133A-A134T-Q136E-C139V-N141S-Y143T-N144S-I147V-V148L-I150V-S158T-G166D-T209Y-N212S-N213T-S216T-F217L-A224T-E248N; A001T-N076D-T078S-T079I-Y086P-D089E-S097G-T103S-L104V-G106S-I111L-S114A-I115G-S116N-N120H-I122A-M124L-G128S-S129P-G131P-T133A-A134T-Q136E-C139V-N141S-Y143T-N144S-I147V-V148L-I150V-S158T-G166D-T209Y-N212S-N213T-S216T-F217L-E248N; A001T-S052A-N076D-Y086P-N087S-A088V-D089S-S097G-T103S-L104V-G106S-I111L-S114A-I115G-S116N-N120H-I122A-M124L-G128S-S129P-G131P-T133A-A134T-Q136E-C139V-N141S-Y143T-N144S-I147V-V148L-I150V-A153S-S158T-G166D-T209Y-N212S-N213T-S216T-F217L-A224T-E248N; A001T-N076D-Y086P-N087S-A088V-D089S-S097G-T103S-L104V-G106S-I111L-S114A-I115G-S116N-N120H-I122A-M124L-G128S-S129P-G131P-T133A-A134T-Q136E-C139V-N141S-Y143T-N144S-I147V-V148L-I150V-A153S-S158T-G166D-T209Y-N212S-N213T-S216T-F217L-A224T-E248N: A001T-N076D-Y086P-N087S-A088V-D089S-S097G-T103S-L104V-G06S-I111L-S114A-I115G-S116N-N120H-I122A-M124L-G128S-S129P-G131P-T133A-A134T-Q136E-C139V-N141S-Y143T-N144S-I147V-V148L-I150V-S158T-G166D-T209Y-N212S-N213T-S216T-F217L-A224T-E248N-Q275H: A001T-N076D-T078S-T079I-Y086P-N087S-A088V-D089S-S097G-T103S-L104V-G106S-I111L-S114A-I115G-S116N-N120H-I122A-M124L-G128S-S129P-G131P-T133A-A134T-Q136E-C139V-N141S-Y143T-N144S-I147V-V148L-I150V-S158T-G166D-T209Y-N212S-N213T-S216T-F217L-A224T-E248N; N076D-G118R-G128D-S129F-S130Y-G166D-E248N; N076D-G118R-G128V-S129M-S130H-G166D-E248N; S052T-N076D-G118R-G128M-S129V-S130F-G166H-Y238F; S02T-N076D-G118R-G128D-S129R-S130I-G166D-F217R-N256R; S052T-N076D-G118R-G128V-S129M-S130H-G166D-E248N-N256E-S272K; S052F-G053Y-N076D-G118R-G128D-S129F-S130Y-G166D-F217R-E248N-N256R-S272K and A001G-A040D-A048Q-S052T-G053E-Y091H-S114T-I147A-S156N-S159N-G166H-S182E-Y238F; wherein the amino acid positions of the variant or recombinant polypeptide or active fragment thereof are numbered by correspondence with the amino acid sequence of SEQ ID NO:10.

[0118] In some embodiments of the invention, LG12-clade enzymes of the present invention comprise substitutions selected from: G053D-N076D-G166D: N038Q-G053E-G100A-N117S-I147A-S158T-G166D-N256P-S272K; A001G-I030V-T078D-V093T-T103E-S156N-S159D-G166S-S94P-F217R-A236N; S024T-G053E-G166D-M222L-N256P; V149L-S156H-T185Q-S272Q-S159D; G053D-N076D-G118R-G166D-N256R; N038Q-G053E-G100A-N117S-I147A-S158T-G166D-S272K; S052T-V149G-S156N-G166H-F217R; A001G-S052Q-V149G-S156N-S159N-S182E-Y238F-S272Q; A001G-S052Q-S114T-S156N-S159N-S182E-Y238F-S272Q; S052T-V149G-S156N-S159D-G166D-F217R: N038Q-G053E-N117S-I147A-S158T-G166D-N256P-S272K; A040D-S114T-I147A-S159N-G I66D-S182E: S052T-V149G-S156N-G166D-S182E-F217R; and S052T-V149G-S156N-G166D-F217R, wherein the amino acid positions of the variant are numbered by correspondence with the amino acid sequence of LG12 wild-type set forth in SEQ ID NO:10.

[0119] In some embodiments of the invention, LG12-clade enzymes of the present invention having a beneficial mutation in long-term stability in at least one boron-free HDL comprise substitutions selected from: G053D-N076D-G166D; V149L-S156H-T185Q-S272Q-S159D; G053D-N076D-G118R-G166D-N256R; N038Q-G053E-G100A-N117S-I147A-S158T-G166D-S272K; S052T-V149G-S156N-G166H-F217R: and S052T-V149G-S156N-G166D-F217R, wherein the amino acid positions of the variant are numbered by correspondence with the amino acid sequence of LG12 wild-type set forth in SEQ ID NO:10.

[0120] Also provided are LG12-clade protease variants useful in a detergent composition where favorable modifications result in a minimum performing index for cleaning performance, stability of the enzyme in detergent compositions and/or thermostability of the enzyme, while having at least one of these characteristics improved from its parent LG12-clade enzyme. In one embodiment, an LG12-clade protease variant is useful in a detergent composition and has a minimum performing index for cleaning performance, stability of the enzyme in detergent compositions and/or thermostability of the enzyme, while having at least one of these characteristics improved over the LG12-clade wild-type parent protease (SEQ ID NO:10).

[0121] The terms “thermal stability” and “thermostability” refer to LG12-clade protease variants of the present invention that retain a specified amount of enzymatic activity after exposure to an identified temperature, often over a given period of time under conditions prevailing during the proteolytic, hydrolyzing, cleaning or other process disclosed herein, for example while exposed to altered temperatures. Altered temperatures include increased or decreased temperatures. In some embodiments, the LG12-clade protease retains at least about 50%, about 60%, about 70%, about 75%, about 80%, about 85%, about 90%, about 92%, about 95%, about 96%, about 97%, about 98%, or about 99% protease activity after exposure to altered temperatures over a given time period, for example, at least about 60 minutes, about 120 minutes, about 180 minutes, about 240 minutes, about 300 minutes, etc.

[0122] As used herein, improved properties of an LG12-clade protease variant has improved residual protease activity, improved cleaning performance, and/or improved stability optionally with retained wash or cleaning performance, relative to the corresponding parent LG2-clade enzyme. In some embodiments, an LG12-clade protease variant has improved stability optionally with retained cleaning performance relative to the corresponding LG2-clade wild-type parent protease (SEQ ID NO:10). In some further embodiments, an LG12-clade protease variant has improved stability with retained cleaning performance relative to the corresponding LG12-clade wild-type parent protease (SEQ ID NO:10). The improved properties of an LG12-clade protease variant may comprise improved cleaning performance and/or improved stability. In some embodiments, the invention provides an LG12-clade protease variant that exhibits one of more of the following properties: improved hand wash performance, improved hand or manual dishwashing performance, improved automatic dishwashing performance, improved laundry performance, and/or improved stability relative to a reference parent LG12-clade enzyme. In some embodiments, the invention provides an LG12-clade protease variant that exhibits one of more of the following properties: improved hand wash performance, improved hand or manual dishwashing performance, improved automatic dishwashing performance, improved laundry performance, and/or improved stability relative to the corresponding LG12-clade wild-type parent protease (SEQ ID NO: 10).

[0123] As noted above, the variant enzyme polypeptides of the invention have enzymatic activities (e.g., protease activities) and thus are useful in cleaning applications, including but not limited to, methods for cleaning dishware items, tableware items, fabrics, and items having hard surfaces (e.g., the hard surface of a table, table top, wall, furniture item, floor, ceiling, etc.). Exemplary cleaning compositions comprising one or more variant serine protease enzyme polypeptides of the invention described infra. The enzymatic activity (e.g., protease enzyme activity) of an enzyme polypeptide of the invention can be determined readily using procedures well known to those of ordinary skill in the art. The Examples presented infra describe methods for evaluating the enzymatic activity and cleaning performance. The performance of polypeptide enzymes of the invention in removing stains (e.g., a protein stain such as blood/milk/ink or egg yolk), cleaning hard surfaces, or cleaning laundry, dishware or tableware item(s) can be readily determined using procedures well known in the art and/or by using procedures set forth in the Examples.

[0124] The serine protease polypeptides of the present invention can have protease activity over a broad range of pH conditions. In some embodiments, the serine protease polypeptides have protease activity on dimethylcasein as a substrate, as demonstrated in Examples below. In some embodiments, the serine protease polypeptides have protease activity at a pH of from about 4.0 to about 12.0. In some embodiments, the serine protease polypeptides have protease activity at a pH of from about 6.0 to about 12.0. In some embodiments, the serine protease polypeptides have at least 50%, 60%, 70%, 80% or 90% of maximal protease activity at a pH of from about 6.0 to about 12.0, or from about 7.0 to about 12.0. In some embodiments, the serine protease polypeptides have protease activity at a pH above 6.0, 6.5, 7.0, 7.5, 8.0, 8.5, 9.0, 9.5, 10.0, 10.5, 11.0 or 11.5. In some embodiments, the serine protease polypeptides have protease activity at a pH below 12.0, 11.5, 11.0, 10.5, 10.0, 9.5, 9.0, 8.5, 8.0, 7.5, 7.0, or 6.5.

[0125] In some embodiments, the serine protease polypeptides of the present invention have protease activity at a temperature range from about 10° C. to about 900C, or from about 30° C. to about 80° C. In some embodiments, the serine protease polypeptides of the present invention have protease activity at a temperature range of from about 55° C. to about 75° C. In some embodiments, the serine protease polypeptides have at least 50%, 60%, 70%, 80% or 90% of maximal protease activity at a temperature of from about 55° C. to about 75° C. In some embodiments, the serine proteases have activity at a temperature above 50° C., 50C, 60° C., 65° C. or 70° C. In some embodiments, the serine proteases have activity at a temperature below 80° C., 75° C., 70° C. 65C, 60° C., or 55° C.

[0126] In some embodiments, the serine protease polypeptides of the present invention demonstrate cleaning performance in a cleaning composition. Cleaning compositions often include ingredients harmful to the stability and performance of enzymes, making cleaning compositions a harsh environment for enzymes, e.g. serine proteases, to retain function. Thus, it is not trivial for an enzyme to be put in a cleaning composition and expect enzymatic function (e.g. serine protease activity, such as demonstrated by cleaning performance). In some embodiments, the serine protease polypeptides of the present invention demonstrate cleaning performance in automatic dishwashing (ADW) detergent compositions. In some embodiments, the cleaning performance in automatic dishwashing (ADW) detergent compositions includes cleaning of egg yolk stains. In some embodiments, the serine protease polypeptides of the present invention demonstrate cleaning performance in laundry detergent compositions. In some embodiments, the cleaning performance in laundry detergent compositions includes cleaning of blood/milk/ink stains. In each of the cleaning compositions, the serine protease polypeptides of the present invention demonstrate cleaning performance with or without a bleach component.

[0127] In some embodiments, the serine protease polypeptides of the present invention have stability in detergent compositions. In some embodiments, the serine protease polypeptides of the present invention have a thermostability T_{50%}, value of at least 60° C.

[0128] A polypeptide of the invention can be subject to various changes, such as one or more amino acid insertions, deletions, and/or substitutions, either conservative or non-conservative, including where such changes do not substantially alter the enzymatic activity of the polypeptide. Similarly, a nucleic acid of the invention can also be subject to various changes, such as one or more substitutions of one or more nucleotides in one or more codons such that a particular codon encodes the same or a different amino acid, resulting in either a silent variation (e.g., when the encoded amino acid is not altered by the nucleotide mutation) or non-silent variation, one or more deletions of one or more nucleic acids (or codons) in the sequence, one or more additions or insertions of one or more nucleic acids (or codons) in the sequence, and/or cleavage of or one or more truncations of one or more nucleic acids (or codons) in the sequence. Many such changes in the nucleic acid sequence may not substantially alter the enzymatic activity of the resulting encoded polypeptide enzyme compared to the polypeptide enzyme encoded by the original nucleic acid sequence. A nucleic acid sequence of the invention can also be modified to include one or more codons that provide for optimum expression in an expression system (e.g., bacterial expression system), while, if desired, said one or more codons still encode the same amino acid(s).

[0129] In some embodiments, the LG12-clade protease variant can be a variant of a parent LG12-clade enzyme from the Genus Bacillus. In other embodiments, the LG12-clade protease variant of the present invention is a variant of a parent LG12-clade enzyme from a genus selected from Bacillus, Geobacillus, Alicyclobacillus, Lactobacillus, Exiguobacterium, Brevbacillus, Paenibacillus, Herpetosiphon, Oceanobacillus, Shewanella, Clostridium, Slaphylococcus, Flavobacterium, Stigmatella, Myxococcus, Vibrio, Methanosarcina, Chryseobacterium, Streptomyces, Kribbella, Janibacter, Nocardioides, Xanthamonas, Micromonospora, Burkholderia, Dehalococcoides, Croceibacter, Kordia, Microscilla, Thermoacinomycves, Chloroflexus, Listeria, Plesioevstis, Haliscomenobacter, Cytophaga, Hahella, Arthrobacter, Brachybacterium, Clavibacter, Microbacterium, Intrasporangium, Frankia, Meiothermus, Pseudomonas, Ricinus, Catenulispora, Anabaena, Nostoc, Halomonas, Chromohalobacter, Bordetella, Variovorax, Dickeya, Pectobacterium, Citrobacter, Enterobacter, Salmonella, Erwinia, Pantoea, Rahnella, Serratia, Geodermatophilus, Gemmata, Xenorhabdus, Photorhabdus, Aspergillus, Neosartorya Pyrenophora, Saccharopolyspora, Nectria, Gibberella, Metarhizium, Waddlia, Cyanothece, Cellulphaga, Providencia, Bradvrhizobium, Agrobacterium, Mucilaginibacter, Serratia, Sorangium, Streptosporangium, Renibacterium, Aeromonas, Reinekea, Chromobacieriumn, Moritella, Halimangium, Kangiella, Marinomonas, Vibrionales, Listonella, Salinivibrio, Photobacterium, Alteromonadales, Legionella, Teredinibacter, Reinekea, Hyvdrogenivirga, and Pseudoalteromonas.

[0130] A polypeptide of the invention can be subject to various changes, such as one or more amino acid insertions, deletions, and/or substitutions, either conservative or non-conservative, including where such changes do not substantially alter the enzymatic activity of the polypeptide. In some embodiments, the present invention provides a genus of polypeptides comprising LG12-clade protease variants having the desired enzymatic activity (e.g., LG12-clade enzyme activity or cleaning performance activity) which comprise sequences having the amino acid substitutions described herein and also which comprise one or more additional amino acid substitutions, such as conservative and non-conservative substitutions, wherein the polypeptide exhibits, maintains, or approximately maintains the desired enzymatic activity (e.g., LG12-clade enzyme activity or proteolytic activity, as reflected in the cleaning activity or performance of the variant LG12-clade enzyme). Amino acid substitutions in accordance with the invention may include, but are not limited to, one or more non-conservative substitutions and/or one or more conservative amino acid substitutions. A conservative amino acid residue substitution typically involves exchanging a member within one functional class of amino acid residues for a residue that belongs to the same functional class (identical amino acid residues are considered functionally homologous or conserved in calculating percent functional homology). A conservative amino acid substitution typically involves the substitution of an amino acid in an amino acid sequence with a functionally similar amino acid. For example, alanine, glycine, serine, and threonine are functionally similar and thus may serve as conservative amino acid substitutions for one another. Aspartic acid and glutamic acid may serve as conservative substitutions for one another. Asparagine and glutamine may serve as conservative substitutions for one another. Arginine, lysine, and histidine may serve as conservative substitutions for one another. Isoleucine, leucine, methionine, and valine may serve as conservative substitutions for one another. Phenylalanine, tyrosine, and tryptophan may serve as conservative substitutions for one another.

[0131] Other conservative amino acid substitution groups can be envisioned. For example, amino acids can be grouped by similar function or chemical structure or composition (e.g., acidic, basic, aliphatic, aromatic, sulfur-containing). For instance, an aliphatic grouping may comprise: Glycine (G), Alanine (A), Valine (V). Leucine (L), Isoleucine (1). Other groups containing amino acids that are considered conservative substitutions for one another include: aromatic: Phenylalanine (F), Tyrosine (Y), Tryptophan (W); sulfur-containing: Methionine (M), Cysteine (C): Basic: Arginine (R), Lysine (K), Histidine (H); Acidic: Aspartic acid (D). Glutamic acid (E); non-polar uncharged residues, Cysteine (C), Methionine (M), and Proline (P); hydrophilic uncharged residues: Serine (S), Threonine (T), Asparagine (N), and Glutamine (Q). Additional groupings of amino acids are well-known to those of skill in the art and described in various standard textbooks. Listing of a polypeptide sequence herein, in conjunction with the above substitution groups, provides an express listing of all conservatively substituted polypeptide sequences.

[0132] More conservative substitutions exist within the amino acid residue classes described above, which also or alternatively can be suitable. Conservation groups for substitutions that are more conservative include: valine-leucine-isoleucine, phenylalanine-tyrosine, lysine-arginine, alanine-valine, and asparagine-glutamine.

[0133] Conservatively substituted variations of a polypeptide sequence of the invention (e.g., variant proteases of the invention) include substitutions of a small percentage, sometimes less than 250%, 20%, 15%, 14%, 13%, 12%, 11%, 10%, 9%, 8%, 7%, or 6% of the amino acids of the polypeptide sequence, or less than 5%, 4%, 3%, 2%, or 1%, or less than 10, 9, 8, 7, 6, 5, 4, 3, 2, or 1 amino acid substitution of the amino acids of the polypeptide sequence, with a conservatively selected amino acid of the same conservative substitution group.

[0134] In some embodiments, the protease variant comprises one or more mutations, and having a total net charge of −5, −4, −3, −2, −1, 0, 1, 2, 3, 4, or 5 relative to LG12-clade wild-type parent (SEQ ID NO:10).

### Nucleic Acids of the Invention

[0135] The invention provides isolated, non-naturally occurring, or recombinant nucleic acids (also referred to herein as “polynucleotides”), which may be collectively referred to as “nucleic acids of the invention” or “polynucleotides of the invention”, which encode polypeptides of the invention. Nucleic acids of the invention, including all described below, are useful in recombinant production (e.g., expression) of polypeptides of the invention, typically through expression of a plasmid expression vector comprising a sequence encoding the polypeptide of interest or fragment thereof. As discussed above, polypeptides include variant protease polypeptides, including LG12-clade protease variant polypeptides having enzymatic activity (e.g., proteolytic activity) which are useful in cleaning applications and cleaning compositions for cleaning an item or a surface (e.g., surface of an item) in need of cleaning.

[0136] In some embodiments, the invention provides an isolated, recombinant, substantially pure, or non-naturally occurring nucleic acid comprising a nucleotide sequence encoding any polypeptide (including any fusion protein, etc.) of the invention described above in the section entitled “Polypeptides of the Invention” and elsewhere herein. The present invention provides nucleic acids encoding a serine protease polypeptide of the present invention, wherein the serine protease polypeptide is a mature form having proteolytic activity. In some embodiments, the serine protease is expressed recombinantly with a homologous pro-peptide sequence. In other embodiments, the serine protease is expressed recombinantly with a heterologous pro-peptide sequence (e.g., GG36 pro-peptide sequence).

[0137] Some embodiments are directed to a polynucleotide comprising a nucleic acid sequence that encodes a protease variant described herein, or recombinant polypeptide or active fragment thereof. In some embodiments, a polynucleotide encodes an isolated, recombinant, substantially pure, or non-naturally occurring LG12-clade protease variant having protease activity, which polypeptide has at least about 60%, at least about 65%, at least about 70%, at least about 75%, at least about 76%, at least about 77%, at least about 78%, at least about 79%, at least about 80%, at least about 81%, at least about 82%, at least about 83%, at least about 84%, at least about 85%, at least about 86%, at least about 87%, at least about 88%, at least about 89%, at least about 90%, at least about 91%, at least about 92%, at least about 93%, at least about 94%, at least about 95%, at least about 96%, at least about 97%, at least about 98%, at least about 99%, at least about 99.5%, or 100% sequence to an amino acid sequence selected from SEQ ID NO: 1, 2, 3, 4, 5, 6, 7, 8, 29, 30, 31, 32, 33, 34, 35, 36, 37, 38, 39, 40, 41, 42, and 43. In some embodiments, a polynucleotide encodes an isolated, recombinant, substantially pure, or non-naturally occurring LG12-clade protease variant having protease activity, which polypeptide has 70%, 71%, 72%, 73%, 74%, 75%, 76%, 77%, 78%, 79%, 80%, 81%, 82%, 83%, 84%, 85%, 86%, 87%, 88%, 89%, 90%. 91%, 92%, 93%, 94%, 95%, 96%, 97%, 98%, 99% or 100% sequence identity to an amino acid sequence selected from SEQ ID NO: 1, 2, 3, 4, 5, 6, 7, 8, 29, 30, 31, 32, 33, 34, 35, 36, 37, 38, 39, 40, 41, 42, and 43. In a still further embodiment, a polynucleotide encodes an isolated, recombinant, substantially pure, or non-naturally occurring LG12-clade protease variant having protease activity, which polypeptide has 70%, 75%, 80%, 85%, 90%, 95%, 96%, 97%, 98%, 990/% or 100% sequence identity to an amino acid sequence selected from SEQ ID NO: 1, 2, 3, 4, 5, 6, 7, 8, 29, 30, 31, 32, 33, 34, 35, 36, 37, 38, 39, 40, 41, 42, and 43. In an even still further embodiment, a polynucleotide encodes an isolated, recombinant, substantially pure, or non-naturally occurring LG12-clade protease variant having protease activity, wherein said polypeptide is selected from SEQ ID NO:1, 2, 3, 4, 5, 6, 7, 8, 29, 30, 31, 32, 33, 34, 35, 36, 37, 38, 39, 40, 41, 42, and 43.

[0138] Also provided is an isolated, recombinant, substantially pure, or non-naturally occurring nucleic acid comprising a polynucleotide sequence which encodes a LG12-clade protease variant having proteolytic activity, said variant comprising an amino acid sequence which differs from the amino acid sequence of SEQ ID NO:1, 2, 3, 4, 5, 6, 7, 8, 29, 30, 31, 32, 33, 34, 35, 36, 37, 38, 39, 40, 41, 42, or 43 by no more than 50, no more than 45, no more than 40, no more than 35, no more than 30, no more than 25, no more than 20, no more than 19, no more than 18, no more than 17, no more than 16, no more than 15, no more than 14, no more than 13, no more than 12, no more than 11, no more than 10, no more than 9, no more than 6, no more than 5, no more than 4, no more than 3, no more than 2 amino acid residues, or no more than 1 amino acid residue(s), as determined by alignment of the variant protease amino acid sequence with the LG12-clade wild-type amino acid sequence.

[0139] Nucleic acids of the invention can be generated by using any suitable synthesis, manipulation, and/or isolation techniques, or combinations thereof. For example, a polynucleotide of the invention may be produced using standard nucleic acid synthesis techniques, such as solid-phase synthesis techniques that are well-known to those skilled in the art. In such techniques, fragments of up to 50 or more nucleotide bases are typically synthesized, then joined (e.g., by enzymatic or chemical ligation methods, or polymerase mediated recombination methods) to form essentially any desired continuous nucleic acid sequence. The synthesis of the nucleic acids of the invention can be also facilitated (or alternatively accomplished) by any suitable method known in the art, including but not limited to chemical synthesis using the classical phosphoramidite method (See e.g., Beaucage et al. Tetrahedron Letters 22:1859-69 [1981]); or the method described by Matthes el al. (See, Matthes et al., EMBO J. 3:801-805 [1984], as is typically practiced in automated synthetic methods. Nucleic acids of the invention also can be produced by using an automatic DNA synthesizer. Customized nucleic acids can be ordered from a variety of commercial sources (e.g., The Midland Certified Reagent Company, the Great American Gene Company, Operon Technologies Inc., and DNA2.0). Other techniques for synthesizing nucleic acids and related principles are known in the art (See e.g., Itakura et al., Ann. Rev. Biochem. 53:323 [1984]; and Itakura et al., Science 198:1056 [1984]).

[0140] As indicated above, recombinant DNA techniques useful in modification of nucleic acids are well known in the art. For example, techniques such as restriction endonuclease digestion, ligation, reverse transcription and cDNA production, and polymerase chain reaction (e.g., PCR) are known and readily employed by those of skill in the art. Nucleotides of the invention may also be obtained by screening cDNA libraries (e.g., cDNA libraries generated using mutagenesis techniques commonly used in the art, including those described herein) using one or more oligonucleotide probes that can hybridize to or PCR-amplify polynucleotides which encode a variant protease polypeptide(s) of the invention. Procedures for screening and isolating cDNA clones and PCR amplification procedures are well known to those of skill in the art and described in standard references known to those skilled in the art. Some nucleic acids of the invention can be obtained by altering a naturally occurring polynucleotide backbone (e.g., that encodes an enzyme or parent protease) by, for example, a known mutagenesis procedure (e.g., site-directed mutagenesis, site saturation mutagenesis, and in vitro recombination).

[0141] A variety of methods are known in the art that are suitable for generating modified polynucleotides of the invention that encode variant proteases of the invention, including, but not limited to, for example, site-saturation mutagenesis, scanning mutagenesis, insertional mutagenesis, deletion mutagenesis, random mutagenesis, site-directed mutagenesis, synthetic gene construction by oligonucleotide synthesis and ligation, and directed-evolution, as well as various other recombinatorial approaches. Methods for making modified polynucleotides and proteins (e.g., variant proteases) include DNA shuffling methodologies, methods based on non-homologous recombination of genes, such as ITCHY (See. Ostermeier et al., 7:2139-44 [1999]), SCRACHY (See, Lutz et al. 98:11248-53 [2001]). SHIPREC (See. Sieber et al., 19:456-60 [200]), and NRR (See, Bittker et al., 20:1024-9 [20011]; Bittker et al., 101:7011-6 [2004]), and methods that rely on the use of oligonucleotides to insert random and targeted mutations, deletions and/or insertions (See. Ness et al., 20:1251-5 [2002]: Coco et al., 20:1246-50 [2002]; Zha et al., 4:34-9 [12003]. Glaser et al., 149:3903-13 [1992]).

[0142] The present invention provides isolated or recombinant vectors comprising at least one polynucleotide of the invention described herein (e.g., a polynucleotide encoding a variant protease of the invention described herein), isolated or recombinant expression vectors or expression cassettes comprising at least one nucleic acid or polynucleotide of the invention, isolated, substantially pure, or recombinant DNA constructs comprising at least one nucleic acid or polynucleotide of the invention, isolated or recombinant cells comprising at least one polynucleotide of the invention, cell cultures comprising cells comprising at least one polynucleotide of the invention, cell cultures comprising at least one nucleic acid or polynucleotide of the invention, and compositions comprising one or more such vectors, nucleic acids, expression vectors, expression cassettes, DNA constructs, cells, cell cultures, or any combination or mixtures thereof.

[0143] In some embodiments, the invention provides recombinant cells comprising at least one vector (e.g., expression vector or DNA construct) of the invention which comprises at least one nucleic acid or polynucleotide of the invention. Some such recombinant cells are transformed or transfected with such at least one vector. Such cells are typically referred to as host cells. Some such cells comprise bacterial cells, including, but are not limited to Bacillus sp. cells, such as B. subtilis cells. The invention also provides recombinant cells (e.g., recombinant host cells) comprising at least one variant protease of the invention.

[0144] In some embodiments, the invention provides a vector comprising a nucleic acid or polynucleotide of the invention. In some embodiments, the vector is an expression vector or expression cassette in which a polynucleotide sequence of the invention which encodes a variant protease of the invention is operably linked to one or additional nucleic acid segments required for efficient gene expression (e.g., a promoter operably linked to the polynucleotide of the invention which encodes a variant protease of the invention). A vector may include a transcription terminator and/or a selection gene, such as an antibiotic resistance gene that enables continuous cultural maintenance of plasmid-infected host cells by growth in antimicrobial-containing media.

[0145] An expression vector may be derived from plasmid or viral DNA, or in alternative embodiments, contains elements of both. Exemplary vectors include, but are not limited to pHYT, pC194, pJH101, pE194, pHP3 (See, Harwood and Cutting [eds.]. Chapter 3, Molecular Biological Methods for Bacillus, John Wiley & Sons [1990]; suitable replicating plasmids for B. subtilis include those listed on p. 92; See also, Perego. Integrational Vectors for Genetic Manipulations in Bacillus subtilis, in Sonenshein et al., [eds.] Bacillus subtilis and Other Gram-Positive Bacteria: Biochemistry., Physiology and Molecular Genetics, American Society for Microbiology, Washington, D.C. [1993]. pp. 615-624).

[0146] For expression and production of a protein of interest (e.g., variant protease) in a cell, at least one expression vector comprising at least one copy of a polynucleotide encoding the modified protease, and preferably comprising multiple copies, is transformed into the cell under conditions suitable for expression of the protease. In some embodiments of the present invention, a polynucleotide sequence encoding the variant protease (as well as other sequences included in the vector) is integrated into the genome of the host cell, while in other embodiments, a plasmid vector comprising a polynucleotide sequence encoding the variant protease remains as autonomous extra-chromosomal element within the cell. The invention provides both extrachromosomal nucleic acid elements as well as incoming nucleotide sequences that are integrated into the host cell genome. The vectors described herein are useful for production of the variant proteases of the invention. In some embodiments, a polynucleotide construct encoding the variant protease is present on an integrating vector that enables the integration and optionally the amplification of the polynucleotide encoding the variant protease into the bacterial chromosome. Examples of sites for integration are well known to those skilled in the art. In some embodiments, transcription of a polynucleotide encoding a variant protease of the invention is effectuated by a promoter that is the wild-type promoter for the selected precursor protease. In some other embodiments, the promoter is heterologous to the precursor protease, but is functional in the host cell. Specifically, examples of suitable promoters for use in bacterial host cells include, but are not limited to, for example, the AprE amyE, amyL, pstS, sacB, pSPAC, pVeg, pHpall promoters, the promoter of the B. stearothermophilus maltogenic amylase gene, the B. amyloliquefaciens (BAN) amylase gene, the B. subtilis alkaline protease gene, the B. clausii alkaline protease gene the B. pumilis xylosidase gene, the B. thuringiensis crylIIA, and the B. licheniformis alpha-amylase gene. Additional promoters include, but are not limited to the A4 promoter, as well as phage Lambda P_{R} or P_{L} promoters, and the E. coli lac, trp or tac promoters.

[0147] Variant proteases of the present invention can be produced in host cells of any suitable microorganism, including bacteria and fungi. For example, in some embodiments, the variant protease is produced in host cells of fungal and/or bacterial origin. In some embodiments, the host cells are Bacillus sp., Streptomyces sp., Escherichia sp. or Aspergillus sp. In some embodiments, the variant proteases are produced by Bacillus sp. host cells. Examples of Bacillus sp. host cells that find use in the production of the variant proteases of the invention include, but are not limited to B. licheniformis, B. lentus, B. subtilis. B. amyloliquefaciens, B. lentus, B. brevis, B. stearothermophilus. B, alkalophilus. B, coagulans. B, circulans, B. pumilis, B. thuringiensis, B. clausii, and B. megaterium, as well as other organisms within the genus Bacillus. In some embodiments, B. subtilis host cells are used for production of variant proteases. U.S. Pat. Nos. 5,264,366 and 4,760.025 (RE 34.606) describe various Bacillus host strains that can be used for producing variant proteases of the invention, although other suitable strains can be used.

[0148] Several industrial bacterial strains that can be used to produce variant proteases of the invention include non-recombinant (i.e., wild-type) Bacillus sp. strains, as well as variants of naturally-occurring strains and/or recombinant strains. In some embodiments, the host strain is a recombinant strain, wherein a polynucleotide encoding a polypeptide of interest has been introduced into the host. In some embodiments, the host strain is a B. subtilis host strain and particularly a recombinant Bacillus subtilis host strain. Numerous B. subtilis strains are known, including, but not limited to for example, 1A6 (ATCC 39085). 168 (1A01), SB19, W23, Ts85, B637, PB1753 through PB1758, PB3360, JH642, 1A243 (ATCC 39,087), ATCC 21332, ATCC 6051, MI113, DE100 (ATCC 39,094), GX4931, PBT 110, and PEP 211 strain (See e.g., Hoch et al., Genetics 73:215-228 [1973]; See also, U.S. Pat. Nos. 4,450,235 and 4,302,544, and EP 0134048, each of which is incorporated by reference in its entirety). The use of B. subtilis as an expression host cells is well known in the art (See e.g., Palva et al., Gene 19:81-87 [1982]; Fahnestock and Fischer, J. Bacteriol., 165:796-804 [1986] and Wang et al., Gene 69:39-47 [1988]). In some embodiments, the Bacillus host cell is a Bacillus sp. that includes a mutation or deletion in at least one of the following genes, degU, degS, degR and degQ. Preferably the mutation is in a degU gene, and more preferably the mutation is degU(Hv)32 (See e.g., Msadek et al., J. Bacteriol. 172:824-834 [1990]; and Olmos et al., Mol. Gen. Genet. 253:562-567 [1997]). One suitable host strain is a Bacillus subtilis carrying a degU32(Hy) mutation. In some embodiments, the Bacillus host comprises a mutation or deletion in scoC4 (See e.g., Caldwell et al., J. Bacteriol. 183:7329-7340 [2001]); spollE (See e.g., Arigoni et al., Mol. Microbiol. 31:1407-1415 [19991]) and/or oppA or other genes of the opp operon (See e.g., Perego et al., Mol. Microbiol. 5:173-185 [1991]). Indeed, it is contemplated that any mutation in the opp operon that causes the same phenotype as a mutation in the oppA gene will find use in some embodiments of the altered Bacillus strain of the invention. In some embodiments, these mutations occur alone, while in other embodiments, combinations of mutations are present. In some embodiments, an altered Bacillus host cell strain that can be used to produce a variant protease of the invention is a Bacillus host strain that already includes a mutation in one or more of the above-mentioned genes. In addition, Bacillus sp. host cells that comprise mutation(s) and/or deletions of endogenous protease genes find use. In some embodiments, the Bacillus host cell comprises a deletion of the aprE and the nprE genes. In other embodiments, the Bacillus sp. host cell comprises a deletion of 5 protease genes, while in other embodiments, the Bacillus sp. host cell comprises a deletion of 9 protease genes (See e.g., U.S. Pat. Appln. Pub. No. 2005/0202535, incorporated herein by reference).

[0149] Host cells are transformed with at least one nucleic acid encoding at least one variant protease of the invention using any suitable method known in the art. Whether the nucleic acid is incorporated into a vector or is used without the presence of plasmid DNA, it is typically introduced into a microorganism, in some embodiments, preferably an E. coli cell or a competent Bacillus cell. Methods for introducing a nucleic acid (e.g., DNA) into Bacillus cells or E. coli cells utilizing plasmid DNA constructs or vectors and transforming such plasmid DNA constructs or vectors into such cells are well known. In some embodiments, the plasmids are subsequently isolated from E. coli cells and transformed into Bacillus cells. However, it is not essential to use intervening microorganisms such as E. coli, and in some embodiments, a DNA construct or vector is directly introduced into a Bacillus host.

[0150] Those of skill in the art are well aware of suitable methods for introducing nucleic acid or polynucleotide sequences of the invention into Bacillus cells (See e.g., Ferrari et al., “Genetics,” in Harwood et al. [eds.], Bacillus. Plenum Publishing Corp. [1989], pp. 57-72; Saunders et al., J. Bacteriol. 157:718-726 [1984]; Hoch et al., J. Bacteriol. 93:1925-1937 [1967]: Mann et al., Current Microbiol. 13:131-135 [1986]; Holubova, Folia Microbiol. 30:97 [1985]; Chang et al., Mol. Gen. Genet. 168:11-115 [1979]; Vorobjeva et al., FEMS Microbiol. Lett. 7:261-263 [1980]; Smith et al., Appl. Env. Microbiol. 51:634 [1981]; Fisher et al., Arch. Microbiol. 139:213-217 [1981]; and McDonald, J. Gen. Microbiol. 130:203 [1984]). Indeed, such methods as transformation, including protoplast transformation and congression, transduction, and protoplast fusion are well known and suited for use in the present invention. Methods of transformation are used to introduce a DNA construct or vector comprising a nucleic acid encoding a variant protease of the present invention into a host cell. Methods known in the art to transform Bacillus cells include such methods as plasmid marker rescue transformation, which involves the uptake of a donor plasmid by competent cells carrying a partially homologous resident plasmid (See, Contente et al., Plasmid 2:555-571 [1979]; Haima et al., Mol. Gen. Genet. 223:185-191 [1990]; Weinrauch et al., J. Bacteriol. 154:1077-1087 [1983]: and Weinrauch et al., J. Bacteriol. 169:1205-1211 [1987]). In this method, the incoming donor plasmid recombines with the homologous region of the resident “helper” plasmid in a process that mimics chromosomal transformation.

[0151] In addition to commonly used methods, in some embodiments, host cells are directly transformed with a DNA construct or vector comprising a nucleic acid encoding a variant protease of the invention (i.e., an intermediate cell is not used to amplify, or otherwise process, the DNA construct or vector prior to introduction into the host cell). Introduction of the DNA construct or vector of the invention into the host cell includes those physical and chemical methods known in the art to introduce a nucleic acid sequence (e.g., DNA sequence) into a host cell without insertion into a plasmid or vector. Such methods include, but are not limited to calcium chloride precipitation, electroporation, naked DNA, liposomes and the like. In additional embodiments, DNA constructs or vector are co-transformed with a plasmid, without being inserted into the plasmid. In further embodiments, a selective marker is deleted from the altered Bacillus strain by methods known in the art (See, Stahl et al., J. Bacteriol. 158:411-418 [1984]; and Pahneros et al., Gene 247:255-264 [2000]).

[0152] In some embodiments, the transformed cells of the present invention are cultured in conventional nutrient media. The suitable specific culture conditions, such as temperature, pH and the like are known to those skilled in the art and are well described in the scientific literature. In some embodiments, the invention provides a culture (e.g., cell culture) comprising at least one variant protease or at least one nucleic acid of the invention. Also provided are compositions comprising at least one nucleic acid, vector, or DNA construct of the invention.

[0153] In some embodiments, host cells transformed with at least one polynucleotide sequence encoding at least one variant protease of the invention are cultured in a suitable nutrient medium under conditions permitting the expression of the present protease, after which the resulting protease is recovered from the culture. The medium used to culture the cells comprises any conventional medium suitable for growing the host cells, such as minimal or complex media containing appropriate supplements. Suitable media are available from commercial suppliers or may be prepared according to published recipes (See e.g., the catalogues of the American Type Culture Collection). In some embodiments, the protease produced by the cells is recovered from the culture medium by conventional procedures, including, but not limited to for example, separating the host cells from the medium by centrifugation or filtration, precipitating the proteinaceous components of the supernatant or filtrate by means of a salt (e.g., ammonium sulfate), chromatographic purification (e.g., ion exchange, gel filtration, affinity, etc.). Any method suitable for recovering or purifyiing a variant protease finds use in the present invention.

[0154] In some embodiments, a variant protease produced by a recombinant host cell is secreted into the culture medium. A nucleic acid sequence that encodes a purification facilitating domain may be used to facilitate purification of soluble proteins. A vector or DNA construct comprising a polynucleotide sequence encoding a variant protease may further comprise a nucleic acid sequence encoding a purification facilitating domain to facilitate purification of the variant protease (See e.g., Kroll et al., DNA Cell Biol. 12:441-53 [1993]). Such purification facilitating domains include, but are not limited to, for example, metal chelating peptides such as histidine-tryptophan modules that allow purification on immobilized metals (See. Porath, Protein Expr. Purif. 3:263-281 [11992]), protein A domains that allow purification on immobilized immunoglobulin, and the domain utilized in the FLAGS extension/affinity purification system (e.g., protein A domains available from Immunex Corp., Seattle, Wash.). The inclusion of a cleavable linker sequence such as Factor XA or enterokinase (e.g., sequences available from Invitrogen, San Diego. Calif.) between the purification domain and the heterologous protein also find use to facilitate purification.

[0155] Assays for detecting and measuring the enzymatic activity of an enzyme, such as a variant protease of the invention, are well known. Various assays for detecting and measuring activity of proteases (e.g., variant proteases of the invention), are also known to those of ordinary skill in the art. In particular, assays are available for measuring protease activity that are based on the release of acid-soluble peptides from casein or hemoglobin, measured as absorbance at 280 nm or colorimetrically using the Folin method, well known to those skilled in the art. Other exemplary assays involve the solubilization of chromogenic substrates (See e.g., Ward, “Proteinases,” in Fogarty (ed.)., Microbial Enzymes and Biotechnology, Applied Science. London, [1983], pp. 251-317). Other exemplary assays include, but are not limited to succinyl-Ala-Ala-Pro-Phe-para nitroanilide assay (suc-AAPF-pNA) and the 2,4,6-trinitrobenzene sulfonate sodium salt assay (TNBS assay). Numerous additional references known to those in the art provide suitable methods (See e.g., Wells et al., Nucleic Acids Res. 11:7911-7925 [1983]; Christianson et al., Anal. Biochem. 223:119-129 [1994]; and Hsia et al., Anal Biochem. 242:221-227 [1199]).

[0156] A variety of methods can be used to determine the level of production of a mature protease (e.g., mature variant proteases of the present invention) in a host cell. Such methods include, but are not limited to, for example, methods that utilize either polyclonal or monoclonal antibodies specific for the protease. Exemplary methods include, but are not limited to enzyme-linked immunosorbent assays (ELISA), radioimmunoassays (RIA), fluorescent immunoassays (FIA), and fluorescent activated cell sorting (FACS). These and other assays are well known in the art (See e.g., Maddox el al., J. Exp. Med. 158:1211 [1983]).

[0157] In some other embodiments, the invention provides methods for making or producing a mature variant protease of the invention. A mature variant protease does not include a signal peptide or a propeptide sequence. Some methods comprise making or producing a variant protease of the invention in a recombinant bacterial host cell, such as for example, a Bacillus sp. cell (e.g., a B. subtilis cell). In some embodiments, the invention provides a method of producing a variant protease of the invention, the method comprising cultivating a recombinant host cell comprising a recombinant expression vector comprising a nucleic acid encoding a variant protease of the invention under conditions conducive to the production of the variant protease. Some such methods further comprise recovering the variant protease from the culture.

[0158] In some embodiments the invention provides methods of producing a variant protease of the invention, the methods comprising: (a) introducing a recombinant expression vector comprising a nucleic acid encoding a variant protease of the invention into a population of cells (e.g., bacterial cells, such as B. subtilis cells): and (b) culturing the cells in a culture medium under conditions conducive to produce the variant protease encoded by the expression vector. Some such methods further comprise: (c) isolating the variant protease from the cells or from the culture medium.

[0159] Unless otherwise noted, all component or composition levels provided herein are made in reference to the active level of that component or composition, and are exclusive of impurities, for example, residual solvents or by-products, which may be present in commercially available sources. Enzyme components weights are based on total active protein. All percentages and ratios are calculated by weight unless otherwise indicated. All percentages and ratios are calculated based on the total composition unless otherwise indicated. In the exemplified detergent compositions, the enzymes levels are expressed by pure enzyme by weight of the total composition and unless otherwise specified, the detergent ingredients are expressed by weight of the total compositions.

[0160] As indicated herein, in some embodiments, the cleaning compositions of the present invention further comprise adjunct materials including, but not limited to, surfactants, builders, bleaches, bleach activators, bleach catalysts, other enzymes, enzyme stabilizing systems, chelants, optical brighteners, soil release polymers, dye transfer agents, dispersants, suds suppressors, dyes, perfumes, colorants, filler salts, hydrotropes, photoactivators, fluorescers, fabric conditioners, hydrolyzable surfactants, preservatives, anti-oxidants, anti-shrinkage agents, anti-wrinkle agents, germicides, fungicides, color speckles, silvercare, anti-tarnish and/or anti-corrosion agents, alkalinity sources, solubilizing agents, carriers, processing aids, pigments, and pH control agents (See e.g., U.S. Pat. Nos. 6,610,642, 6,605,458, 5,705,464, 5,710,115, 5,698,504, 5,695,679, 5,686,014 and 5,646,101, all of which are incorporated herein by reference). Embodiments of specific cleaning composition materials are exemplified in detail below. In embodiments in which the cleaning adjunct materials are not compatible with the variant proteases of the present invention in the cleaning compositions, then suitable methods of keeping the cleaning adjunct materials and the protease(s) separated (i.e., not in contact with each other) until combination of the two components is appropriate are used. Such separation methods include any suitable method known in the art (e.g., gelcaps, encapsulation, tablets, physical separation, etc.).

[0161] The cleaning compositions of the present invention are advantageously employed for example, in laundry applications, hard surface cleaning, dishwashing applications, as well as cosmetic applications such as dentures, teeth, hair and skin. In addition, due to the unique advantages of increased effectiveness in lower temperature solutions, the enzymes of the present invention are ideally suited for laundry applications. Furthermore, the enzymes of the present invention find use in granular and liquid compositions.

[0162] The variant proteases of the present invention also find use in cleaning additive products. In some embodiments, low temperature solution cleaning applications find use. In some embodiments, the present invention provides cleaning additive products including at least one enzyme of the present invention is ideally suited for inclusion in a wash process when additional bleaching effectiveness is desired. Such instances include, but are not limited to low temperature solution cleaning applications. In some embodiments, the additive product is in its simplest form, one or more proteases. In some embodiments, the additive is packaged in dosage form for addition to a cleaning process. In some embodiments, the additive is packaged in dosage form for addition to a cleaning process where a source of peroxygen is employed and increased bleaching effectiveness is desired. Any suitable single dosage unit form finds use with the present invention, including but not limited to pills, tablets, gelcaps, or other single dosage units such as pre-measured powders or liquids. In some embodiments, filler(s) or carrier material(s) are included to increase the volume of such compositions. Suitable filler or carrier materials include, but are not limited to, various salts of sulfate, carbonate and silicate as well as talc, clay and the like. Suitable filler or carrier materials for liquid compositions include, but are not limited to water or low molecular weight primary and secondary alcohols including polyols and diols. Examples of such alcohols include, but are not limited to, methanol, ethanol, propanol and isopropanol. In some embodiments, the compositions contain from about 5% to about 90% of such materials. Acidic fillers find use to reduce pH. Alternatively, in some embodiments, the cleaning additive includes adjunct ingredients, as more fully described below.

[0163] The present cleaning compositions and cleaning additives require an effective amount of at least one of the protease variants provided herein, alone or in combination with other proteases and/or additional enzymes. The required level of enzyme is achieved by the addition of one or more protease variants of the present invention. Typically the present cleaning compositions comprise at least about 0.0001 weight percent, from about 0.0001 to about 10, from about 0.001 to about 1, or even from about 0.01 to about 0.1 weight percent of at least one of the variant proteases of the present invention.

[0164] The cleaning compositions herein are typically formulated such that, during use in aqueous cleaning operations, the wash water will have a pH of from about 5.0 to about 11.5 or even from about 7.5 to about 10.5. Liquid product formulations are typically formulated to have a neat pH from about 3.0 to about 9.0 or even from about 3 to about 5. Granular laundry products are typically formulated to have a pH from about 9 to about 11. Techniques for controlling pH at recommended usage levels include the use of buffers, alkalis, acids, etc., and are well known to those skilled in the art.

[0165] Suitable “low pH cleaning compositions” typically have a neat pH of from about 3 to about 5, and are typically free of surfactants that hydrolyze in such a pH environment. Such surfactants include sodium alkyl sulfate surfactants that comprise at least one ethylene oxide moiety or even from about 1 to about 16 moles of ethylene oxide. Such cleaning compositions typically comprise a sufficient amount of a pH modifier, such as sodium hydroxide, monoethanolamine or hydrochloric acid, to provide such cleaning composition with a neat pH of from about 3 to about 5. Such compositions typically comprise at least one acid stable enzyme. In some embodiments, the compositions are liquids, while in other embodiments, they are solids. The pH of such liquid compositions is typically measured as a neat pH. The pH of such solid compositions is measured as a 10% solids solution of said composition wherein the solvent is distilled water. In these embodiments, all pH measurements are taken at 20° C., unless otherwise indicated.

[0166] In some embodiments, when the variant protease(s) is/are employed in a granular composition or liquid, it is desirable for the variant protease to be in the form of an encapsulated particle to protect the variant protease from other components of the granular composition during storage. In addition, encapsulation is also a means of controlling the availability of the variant protease during the cleaning process. In some embodiments, encapsulation enhances the performance of the variant protease(s) and/or additional enzymes. In this regard, the variant proteases of the present invention are encapsulated with any suitable encapsulating material known in the art. In some embodiments, the encapsulating material typically encapsulates at least part of the catalyst for the variant protease(s) of the present invention. Typically, the encapsulating material is water-soluble and/or water-dispersible. In some embodiments, the encapsulating material has a glass transition temperature (Tg) of 0° C. or higher. Glass transition temperature is described in more detail in WO97/11151. The encapsulating material is typically selected from consisting of carbohydrates, natural or synthetic gums, chitin, chitosan, cellulose and cellulose derivatives, silicates, phosphates, borates, polyvinyl alcohol, polyethylene glycol, paraffin waxes, and combinations thereof. When the encapsulating material is a carbohydrate, it is typically selected from monosaccharides, oligosaccharides, polysaccharides, and combinations thereof. In some typical embodiments, the encapsulating material is a starch (See e.g., EP 0922499 and U.S. Pat. Nos. 4,977,252; 5,354,559 and U.S. Pat. No. 5,935,826). In some embodiments, the encapsulating material is a microsphere made from plastic such as thermoplastics, acrylonitrile, methacrylonitrile, polyacrylonitrile, polymethacrylonitrile and mixtures thereof; commercially available microspheres that find use include, but are not limited to those supplied by EXPANCEL® (Stockviksverken, Sweden), and PM6545, PM 6550. PM7220, PM7228, EXTENDOSPHERES®, LUXSIL®, Q-CEL®, and SPHERICEL® (PQ Corp., Valley Forge, Pa.).

[0167] As described herein, the variant proteases of the present invention find particular use in the cleaning industry, including, but not limited to laundry and dish detergents. These applications place enzymes under various environmental stresses. The variant proteases of the present invention provide advantages over many currently used enzymes, due to their stability under various conditions.

[0168] Indeed, there are a variety of wash conditions including varying detergent formulations, wash water volumes, wash water temperatures, and lengths of wash time, to which proteases involved in washing are exposed. In addition, detergent formulations used in different geographical areas have different concentrations of their relevant components present in the wash water. For example, European detergents typically have about 4500-5000 ppm of detergent components in the wash water, while Japanese detergents typically have approximately 667 ppm of detergent components in the wash water. In North America, particularly the United States, detergents typically have about 975 ppm of detergent components present in the wash water.

[0169] A low detergent concentration system includes detergents where less than about 800 ppm of the detergent components are present in the wash water. Japanese detergents are typically considered low detergent concentration system as they have approximately 667 ppm of detergent components present in the wash water.

[0170] A medium detergent concentration includes detergents where between about 800 ppm and about 2000 ppm of the detergent components are present in the wash water. North American detergents are generally considered to be medium detergent concentration systems as they have approximately 975 ppm of detergent components present in the wash water. Brazil typically has approximately 1500 ppm of detergent components present in the wash water.

[0171] A high detergent concentration system includes detergents where greater than about 2000 ppm of the detergent components are present in the wash water. European detergents are generally considered to be high detergent concentration systems as they have approximately 4500-5000 ppm of detergent components in the wash water.

[0172] Latin American detergents are generally high suds phosphate builder detergents and the range of detergents used in Latin America can fall in both the medium and high detergent concentrations as they range from 1500 ppm to 6000 ppm of detergent components in the wash water. As mentioned above. Brazil typically has approximately 1500 ppm of detergent components present in the wash water. However, other high suds phosphate builder detergent geographies, not limited to other Latin American countries, may have high detergent concentration systems up to about 6000 ppm of detergent components present in the wash water.

[0173] In light of the foregoing, it is evident that concentrations of detergent compositions in typical wash solutions throughout the world varies from less than about 800 ppm of detergent composition (“low detergent concentration geographies”), for example about 667 ppm in Japan, to between about 800 ppm to about 2000 ppm (“medium detergent concentration geographies”), for example about 975 ppm in U.S. and about 1500 ppm in Brazil, to greater than about 2000 ppm (“high detergent concentration geographies”), for example about 4500 ppm to about 5000 ppm in Europe and about 6000 ppm in high suds phosphate builder geographies.

[0174] The concentrations of the typical wash solutions are determined empirically. For example, in the U.S., a typical washing machine holds a volume of about 64.4 L of wash solution. Accordingly, in order to obtain a concentration of about 975 ppm of detergent within the wash solution about 62.79 g of detergent composition must be added to the 64.4 L of wash solution. This amount is the typical amount measured into the wash water by the consumer using the measuring cup provided with the detergent.

[0175] As a further example, different geographies use different wash temperatures. The temperature of the wash water in Japan is typically less than that used in Europe. For example, the temperature of the wash water in North America and Japan is typically between about 10 and about 30° C. (e.g., about 20° C.), whereas the temperature of wash water in Europe is typically between about 30 and about 60° C. (e.g., about 40° C.). However, in the interest of saving energy, many consumers are switching to using cold water washing. In addition, in some further regions, cold water is typically used for laundry, as well as dish washing applications. In some embodiments, the “cold water washing” of the present invention utilizes “cold water detergent” suitable for washing at temperatures from about 10° C. to about 40° C., or from about 20° C. to about 30° C. or from about 15° C. to about 25° C. as well as all other combinations within the range of about 15° C. to about 35° C., and all ranges within 10° C. to 40° C.

[0176] As a further example, different geographies typically have different water hardness. Water hardness is usually described in terms of the grains per gallon mixed Ca²⁺/Mg²⁺. Hardness is a measure of the amount of calcium (Ca²⁺) and magnesium (Mg²⁺) in the water. Most water in the United States is hard, but the degree of hardness varies. Moderately hard (60-120 ppm) to hard (121-181 ppm) water has 60 to 181 parts per million (parts per million converted to grains per U.S. gallon is ppm # divided by 17.1 equals grains per gallon) of hardness minerals.

| Water | Grains per gallon | Parts per million |
|---|---|---|
| Soft | less than 1.0 | less than 17 |
| Slightly hard | 1.0 to 3.5 | 17 to 60 |
| Moderately hard | 3.5 to 7.0 | 60 to 120 |
| Hard | 7.0 to 10.5 | 120 to 180 |
| Very hard | greater than 10.5 | greater than 180 |

[0177] European water hardness is typically greater than about 10.5 (for example about 10.5 to about 20.0) grains per gallon mixed Ca²⁺/Mg²⁺ (e.g., about 15 grains per gallon mixed Ca²⁺/Mg²⁺). North American water hardness is typically greater than Japanese water hardness, but less than European water hardness. For example, North American water hardness can be between about 3 to about 10 grains, about 3 to about 8 grains or about 6 grains. Japanese water hardness is typically lower than North American water hardness, usually less than about 4, for example about 3 grains per gallon mixed Ca²⁺/Mg^{2′}.

[0178] Accordingly, in some embodiments, the present invention provides variant proteases that show surprising wash performance in at least one set of wash conditions (e.g., water temperature, water hardness, and/or detergent concentration). In some embodiments, the variant proteases of the present invention are comparable in wash performance to other LG12 proteases. In some embodiments of the present invention, the variant proteases provided herein exhibit enhanced oxidative stability, enhanced thermal stability, enhanced cleaning capabilities under various conditions, and/or enhanced chelator stability. In addition, the variant proteases of the present invention find use in cleaning compositions that do not include detergents, again either alone or in combination with builders and stabilizers.

[0179] In some embodiments of the present invention, the cleaning compositions comprise at least one variant protease of the present invention at a level from about 0.00001 to about 10% by weight of the composition and the balance (e.g., about 99.999 to about 90.0%) comprising cleaning adjunct materials by weight of composition. In some other embodiments of the present invention, the cleaning compositions of the present invention comprises at least one variant protease at a level of about 0.0001 to about 10%, about 0.001 to about 5%, about 0.001 to about 2%, about 0.005 to about 0.5% by weight of the composition and the balance of the cleaning composition (e.g., about 99.9999 to about 90.0%, about 99.999 to about 98%, about 99.995 to about 99.5% by weight) comprising cleaning adjunct materials.

[0180] In some embodiments, the cleaning compositions of the present invention comprise one or more additional detergent enzymes, which provide cleaning performance and/or fabric care and/or dishwashing benefits. Examples of suitable enzymes include, but are not limited to, hemicellulases, cellulases, peroxidases, proteases, xylanases, lipases, phospholipases, esterases, cutinases, pectinases, pectate lyases, mannanases, keratinases, reductases, oxidases, phenoloxidases, lipoxygenases, ligninases, pullulanases, tannases, pentosanases, malanases. ß-glucanases, arabinosidases, hyaluronidases, chondroitinases, laccases, and amylases, or any combinations or mixtures thereof. In some embodiments, a combination of enzymes is used (i.e., a “cocktail”) comprising conventional applicable enzymes like protease, lipase, cutinase and/or cellulase in conjunction with amylase is used.

[0181] In addition to the protease variants provided herein, any other suitable protease finds use in the compositions of the present invention. Suitable proteases include those of animal, vegetable or microbial origin. In some embodiments, microbial proteases are used. In some embodiments, chemically or genetically modified mutants are included. In some embodiments, the protease is a serine protease, preferably an alkaline microbial protease or a trypsin-like protease. Examples of alkaline proteases include subtilisins, especially those derived from Bacillus (e.g., subtilisin, lentus, amyloliquefaciens, subtilisin Carlsberg, subtilisin 309, subtilisin 147 and subtilisin 168). Additional examples include those mutant proteases described in U.S. Pat. Nos. RE 34,606, 5,955,340, 5,700,676, 6,312,936, and 6.482,628, all of which are incorporated herein by reference. Additional protease examples include, but are not limited to trypsin (e.g., of porcine or bovine origin), and the Fusariton protease described in WO 89/06270. In some embodiments, commercially available protease enzymes that find use in the present invention include, but are not limited to MAXATASE®, MAXACAL™, MAXAPEM™, OPTICLEAN®, OPTIMASE®, PROPERASE®, PURAFECT®, PURAFECT® OXP, PURAMAX®, EXCELLASE®, and PURAFAST™ (Genencor); ALCALASE®, SAVINASE®, PRIMASE®, DURAZYM™, POLARZYME®, OVOZYME®, KANNASE®, LIQUANASE®, NEUTRASE®, RELASE® and ESPERASE® (Novozymes); BLAP™ and BLAP™ variants (Henkel Kommanditgesellschaft auf Aktien, Duesseldorf, Germany), and KAP (B. alkalophilus subtilisin: Kao Corp., Tokyo. Japan). Various proteases are described in WO95/23221, WO 92/21760. U.S. Pat. Publ. No. 2008/0090747, and U.S. Pat. Nos. 5,801,039, 5,340,735, 5,500,364, 5,855,625, US RE 34,606, 5,955,340, 5,700,676, 6,312,936, and 6,482,628, and various other patents. In some further embodiments, serine proteases find use in the present invention, including but not limited to the neutral serine protease described in WO07/044993.

[0182] In addition, any suitable lipase finds use in the present invention. Suitable lipases include, but are not limited to those of bacterial or fungal origin. Chemically or genetically modified mutants are encompassed by the present invention. Examples of useful lipases include H. lanuginosa lipase (See e.g., EP258068 and EP305216), R. miehei lipase (See e.g., EP238023), Candida lipase, such as C. antarctica lipase (e.g., the C. antarctica lipase A or B; See e.g., EP214761), Pseudomonas lipases such as P. alcaligenes lipase and P. pseudoalcaligenes lipase (See e.g., EP218272), P. cepacia lipase (See e.g., EP331376), P. stutzeri lipase (See e.g., GB1372034), P. fluorescens lipase, Bacillus lipase (e.g., B. subtilis lipase [Dartois et al., Biochem. Biophys. Acta 1131:253-260 [1993]); B. stearothermophilus lipase [See e.g., JP 64/744992]; and B. pumilus lipase [See e.g., WO 91/16422]).

[0183] Furthermore, a number of cloned lipases find use in some embodiments of the present invention, including but not limited to P. camembertii lipase (See, Yamaguchi et al., Gene 103:61-67 [1991]), G, canddum lipase (See, Schimada et al., J. Biochem., 106:383-388 [1989]), and various Rhizopus lipases such as R. delemar lipase (See. Hass et al., Gene 109:117-113 [1991]), a R. niveus lipase (Kugimiya et al., Biosci. Biotech. Biochem. 56:716-719 [1992]) and R. oryzae lipase.

[0184] Other types of lipolytic enzymes such as cutinases also find use in some embodiments of the present invention, including but not limited to the cutinase derived from Pseudomonas mendocina (See, WO88/09367), and the cutinase derived from Fusarium solanipisi (See, WO90/09446).

[0185] Additional suitable lipases include commercially available lipases such as M1 LIPASE™, LUMA FAST™, and LIPOMAX™ (Genencor); LIPEX®, LIPOLASE® and LIPOLASE® ULTRA (Novozymes); and LIPASE P™ “Amano” (Amano Pharmaceutical Co. Ltd., Japan).

[0186] In some embodiments of the present invention, the cleaning compositions of the present invention further comprise lipases at a level from about 0.00001 to about 10% of additional lipase by weight of the composition and the balance of cleaning adjunct materials by weight of composition. In some other embodiments of the present invention, the cleaning compositions of the present invention also comprise lipases at a level of about 0.0001 to about 10%, about 0.001 to about 5%, about 0.001 to about 2%, about 0.005 to about 0.5% lipase by weight of the composition.

[0187] In some embodiments of the present invention, any suitable amylase finds use in the present invention. In some embodiments, any amylase (e.g., alpha and/or beta) suitable for use in alkaline solutions also find use. Suitable amylases include, but are not limited to those of bacterial or fungal origin. Chemically or genetically modified mutants are included in some embodiments. Amylases that find use in the present invention, include, but are not limited to a-amylases obtained from B. licheniformis (See e.g., GB1296839). Commercially available amylases that find use in the present invention include, but are not limited to DURAMYL®, TERMAMYL®, FUNGAMYL®, STAINZYME®, STAINZYME PLUS®, STAINZYME ULTRA®, and BAN™ (Novozymes), as well as POWERASE™, RAPIDASE® and MAXAMYL® P (Genencor).

[0188] In some embodiments of the present invention, the cleaning compositions of the present invention further comprise amylases at a level from about 0.00001 to about 10% of additional amylase by weight of the composition and the balance of cleaning adjunct materials by weight of composition. In some other embodiments of the present invention, the cleaning compositions of the present invention also comprise amylases at a level of about 0.0001 to about 10%, about 0.001 to about 5%, about 0.001 to about 2%, about 0.005 to about 0.5% amylase by weight of the composition.

[0189] In some further embodiments, any suitable cellulase finds used in the cleaning compositions of the present invention. Suitable cellulases include, but are not limited to those of bacterial or fungal origin. Chemically or genetically modified mutants are included in some embodiments. Suitable cellulases include, but are not limited to H. insolens cellulases (See e.g., U.S. Pat. No. 4,435,307). Especially suitable cellulases are the cellulases having color care benefits (See e.g., EP0495257). Commercially available cellulases that find use in the present include, but are not limited to CELLUZYME®. CAREZYME® (Novozymes), and KAC-500(B)™ (Kao Corporation). In some embodiments, cellulases are incorporated as portions or fragments of mature wild-type or variant cellulases, wherein a portion of the N-terminus is deleted (See e.g., U.S. Pat. No. 5,874,276). In some embodiments, the cleaning compositions of the present invention further comprise cellulases at a level from about 0.00001 to about 10% of additional cellulase by weight of the composition and the balance of cleaning adjunct materials by weight of composition. In some other embodiments of the present invention, the cleaning compositions of the present invention also comprise cellulases at a level of about 0.0001 to about 10%, about 0.001 to about 5%, about 0.001 to about 2%, about 0.005% to about 0.5% cellulase by weight of the composition.

[0190] Any mannanase suitable for use in detergent compositions also finds use in the present invention. Suitable mannanases include, for example, those of bacterial or fungal origin. Chemically or genetically modified mutants are included in some embodiments. Various mannanases are known which find use in the present invention (See e.g., U.S. Pat. Nos. 6,566,114, 6,602,842, and 6,440,991. In some embodiments, the cleaning compositions of the present invention further comprise mannanases at a level from about 0.00001 to about 10% of additional mannanase by weight of the composition and the balance of cleaning adjunct materials by weight of composition. In some embodiments of the present invention, the cleaning compositions of the present invention also comprise mannanases at a level of about 0.0001 to about 10%, about 0.001 to about 5%, about 0.001 to about 2%, about 0.005 to about 0.5% mannanase by weight of the composition.

[0191] In some embodiments, peroxidases are used in combination with hydrogen peroxide or a source thereof (e.g., a percarbonate, perborate or persulfate) in the compositions of the present invention. In some alternative embodiments, oxidases are used in combination with oxygen. Both types of enzymes are used for “solution bleaching” (i.e., to prevent transfer of a textile dye from a dyed fabric to another fabric when the fabrics are washed together in a wash liquor), preferably together with an enhancing agent (See e.g., WO94/12621 and WO95/01426). Suitable peroxidases/oxidases include, but are not limited to those of plant, bacterial or fungal origin. Chemically or genetically modified mutants are included in some embodiments. In some embodiments, the cleaning compositions of the present invention further comprise peroxidase and/or oxidase enzymes at a level from about 0.00001 to about 10% of additional peroxidase and/or oxidase by weight of the composition and the balance of cleaning adjunct materials by weight of composition. In some other embodiments of the present invention, the cleaning compositions of the present invention also comprise peroxidase and/or oxidase enzymes at a level of about 0.0001 to about 10%, about 0.001 to about 5%, about 0.001 to about 2%, about 0.005 to about 0.5% peroxidase and/or oxidase enzymes by weight of the composition.

[0192] In some embodiments, additional enzymes find use, including but not limited to perhydrolases (See e.g., WO05/056782). In addition, in some embodiments, mixtures of the above mentioned enzymes are encompassed herein, in particular one or more additional protease, amylase, lipase, mannanase, and/or at least one cellulase. Indeed, it is contemplated that various mixtures of these enzymes will find use in the present invention. It is also contemplated that the varying levels of the variant protease(s) and one or more additional enzymes may both independently range to about 10%, the balance of the cleaning composition being cleaning adjunct materials. The specific selection of cleaning adjunct materials are readily made by considering the surface, item, or fabric to be cleaned, and the desired form of the composition for the cleaning conditions during use (e.g., through the wash detergent use).

[0193] Examples of suitable cleaning adjunct materials include, but are not limited to, surfactants, builders, bleaches, bleach activators, bleach catalysts, other enzymes, enzyme stabilizing systems, chelants, optical brighteners, soil release polymers, dye transfer agents, dye transfer inhibiting agents, catalytic materials, hydrogen peroxide, sources of hydrogen peroxide, preformed peracids, polymeric dispersing agents, clay soil removal agents, structure elasticizing agents, dispersants, suds suppressors, dyes, perfumes, colorants, filler salts, hydrotropes, photoactivators, fluorescers, fabric conditioners, fabric softeners, carriers, hydrotropes, processing aids, solvents, pigments, hydrolyzable surfactants, preservatives, anti-oxidants, anti-shrinkage agents, anti-wrinkle agents, germicides, fungicides, color speckles, silvercare, anti-tarnish and/or anti-corrosion agents, alkalinity sources, solubilizing agents, carriers, processing aids, pigments, and pH control agents (See e.g., U.S. Pat. Nos. 6,610,642, 6,605,458, 5,705,464, 5,710,115, 5,698,504, 5,695,679, 5,686,014 and 5,646,101, all of which are incorporated herein by reference). Embodiments of specific cleaning composition materials are exemplified in detail below. In embodiments in which the cleaning adjunct materials are not compatible with the variant proteases of the present invention in the cleaning compositions, then suitable methods of keeping the cleaning adjunct materials and the protease(s) separated (i.e., not in contact with each other) until combination of the two components is appropriate are used. Such separation methods include any suitable method known in the art (e.g., gelcaps, encapsulation, tablets, physical separation, etc.).

[0194] In some embodiments, an effective amount of one or more variant protease(s) provided herein is included in compositions useful for cleaning a variety of surfaces in need of proteinaceous stain removal. Such cleaning compositions include cleaning compositions for such applications as cleaning hard surfaces, fabrics, and dishes. Indeed, in some embodiments, the present invention provides fabric cleaning compositions, while in other embodiments the present invention provides non-fabric cleaning compositions. Notably, the present invention also provides cleaning compositions suitable for personal care, including oral care (including dentrifices, toothpastes, mouthwashes, etc., as well as denture cleaning compositions), skin, and hair cleaning compositions. It is intended that the present invention encompass detergent compositions in any form (i.e., liquid, granular, bar, semi-solid, gels, emulsions, tablets, capsules, etc.).

[0195] By way of example, several cleaning compositions wherein the variant proteases of the present invention find use are described in greater detail below. In some embodiments in which the cleaning compositions of the present invention are formulated as compositions suitable for use in laundry machine washing method(s), the compositions of the present invention preferably contain at least one surfactant and at least one builder compound, as well as one or more cleaning adjunct materials preferably selected from organic polymeric compounds, bleaching agents, additional enzymes, suds suppressors, dispersants, lime-soap dispersants, soil suspension and anti-redeposition agents and corrosion inhibitors. In some embodiments, laundry compositions also contain softening agents (i.e., as additional cleaning adjunct materials). The compositions of the present invention also find use detergent additive products in solid or liquid form. Such additive products are intended to supplement and/or boost the performance of conventional detergent compositions and can be added at any stage of the cleaning process. In some embodiments, the density of the laundry detergent compositions herein ranges from about 400 to about 1200 g/liter, while in other embodiments, it ranges from about 500 to about 950 g/liter of composition measured at 20° C.

[0196] In embodiments formulated as compositions for use in manual dishwashing methods, the compositions of the invention preferably contain at least one surfactant and preferably at least one additional cleaning adjunct material selected from organic polymeric compounds, suds enhancing agents, group 11 metal ions, solvents, hydrotropes and additional enzymes.

[0197] In some embodiments, various cleaning compositions such as those provided in U.S. Pat. No. 6,605,458, find use with the variant proteases of the present invention. Thus, in some embodiments, the compositions comprising at least one variant protease of the present invention is a compact granular fabric cleaning composition, while in other embodiments, the composition is a granular fabric cleaning composition useful in the laundering of colored fabrics, in further embodiments, the composition is a granular fabric cleaning composition which provides softening through the wash capacity, in additional embodiments, the composition is a heavy duty liquid fabric cleaning composition. In some embodiments, the compositions comprising at least one variant protease of the present invention are fabric cleaning compositions such as those described in U.S. Pat. Nos. 6,610,642 and 6,376,450. In addition, the variant proteases of the present invention find use in granular laundry detergent compositions of particular utility under European or Japanese washing conditions (See e.g., U.S. Pat. No. 6,610,642).

[0198] In some alternative embodiments, the present invention provides hard surface cleaning compositions comprising at least one variant protease provided herein. Thus, in some embodiments, the compositions comprising at least one variant protease of the present invention is a hard surface cleaning composition such as those described in U.S. Pat. Nos. 6,610,642, 6,376,450, and 6,376,450.

[0199] In yet further embodiments, the present invention provides dishwashing compositions comprising at least one variant protease provided herein. Thus, in some embodiments, the compositions comprising at least one variant protease of the present invention is a hard surface cleaning composition such as those in U.S. Pat. Nos. 6,610,642 and 6,376,450. In some still further embodiments, the present invention provides dishwashing compositions comprising at least one variant protease provided herein. In some further embodiments, the compositions comprising at least one variant protease of the present invention comprise oral care compositions such as those in U.S. Pat. Nos. 6,376,450 and 6,376,450. The formulations and descriptions of the compounds and cleaning adjunct materials contained in the aforementioned U.S. Pat. Nos. 6,376,450, 6,605,458, 6,605,458, and 6,610,642, find use with the variant proteases provided herein.

[0200] The cleaning compositions of the present invention are formulated into any suitable form and prepared by any process chosen by the formulator, non-limiting examples of which are described in U.S. Pat. Nos. 5,879,584, 5,691,297, 5,574,005, 5,569,645, 5,565,422, 5,516,448, 5,489,392, and 5.486,303. When a low pH cleaning composition is desired, the pH of such composition is adjusted via the addition of a material such as monoethanolamine or an acidic material such as HCl.

[0201] While not essential for the purposes of the present invention, the non-limiting list of adjuncts illustrated hereinafter are suitable for use in the instant cleaning compositions. In some embodiments, these adjuncts are incorporated for example, to assist or enhance cleaning performance, for treatment of the substrate to be cleaned, or to modify the aesthetics of the cleaning composition as is the case with perfumes, colorants, dyes or the like. It is understood that such adjuncts are in addition to the variant proteases of the present invention. The precise nature of these additional components, and levels of incorporation thereof, will depend on the physical form of the composition and the nature of the cleaning operation for which it is to be used. Suitable adjunct materials include, but are not limited to, surfactants, builders, chelating agents, dye transfer inhibiting agents, deposition aids, dispersants, additional enzymes, and enzyme stabilizers, catalytic materials, bleach activators, bleach boosters, hydrogen peroxide, sources of hydrogen peroxide, preformed peracids, polymeric dispersing agents, clay soil removal/anti-redeposition agents, brighteners, suds suppressors, dyes, perfumes, structure elasticizing agents, fabric softeners, carriers, hydrotropes, processing aids and/or pigments. In addition to the disclosure below, suitable examples of such other adjuncts and levels of use are found in U.S. Pat. Nos. 5,576,282, 6,306,812, and 6,326,348. The aforementioned adjunct ingredients may constitute the balance of the cleaning compositions of the present invention.

[0202] In some embodiments, the cleaning compositions according to the present invention comprise at least one surfactant and/or a surfactant system wherein the surfactant is selected from nonionic surfactants, anionic surfactants, cationic surfactants, ampholytic surfactants, zwitterionic surfactants, semi-polar nonionic surfactants and mixtures thereof. In some low pH cleaning composition embodiments (e.g., compositions having a neat pH of from about 3 to about 5), the composition typically does not contain alkyl ethoxylated sulfate, as it is believed that such surfactant may be hydrolyzed by such compositions the acidic contents. In some embodiments, the surfactant is present at a level of from about 0.1 to about 60%, while in alternative embodiments the level is from about 1 to about 50%, while in still further embodiments the level is from about 5 to about 40%, by weight of the cleaning composition.

[0203] In some embodiments, the cleaning compositions of the present invention comprise one or more detergent builders or builder systems. In some embodiments incorporating at least one builder, the cleaning compositions comprise at least about 1%, from about 3 to about 60% or even from about 5 to about 40% builder by weight of the cleaning composition. Builders include, but are not limited to, the alkali metal, ammonium and alkanolammoniumn salts of polyphosphates, alkali metal silicates, alkaline earth and alkali metal carbonates, aluminosilicates, polycarboxylate compounds, ether hydroxypolycarboxylates, copolymers of maleic anhydride with ethylene or vinyl methyl ether, 1, 3, 5-trihydroxy benzene-2, 4, 6-trisulphonic acid, and carboxymethyloxysuccinic acid, the various alkali metal, ammonium and substituted ammonium salts of polyacetic acids such as ethylenediamine tetraacetic acid and nitrilotriacetic acid, as well as polycarboxylates such as mellitic acid, succinic acid, citric acid, oxydisuccinic acid, polymaleic acid, benzene 1,3,5-tricarboxylic acid, carboxymethyloxysuccinic acid, and soluble salts thereof. Indeed, it is contemplated that any suitable builder will find use in various embodiments of the present invention.

[0204] In some embodiments, the builders form water-soluble hardness ion complexes (e.g., sequestering builders), such as citrates and polyphosphates (e.g., sodium tripolyphosphate and sodium tripolyphospate hexahydrate, potassium tripolyphosphate, and mixed sodium and potassium tripolyphosphate, etc.). It is contemplated that any suitable builder will find use in the present invention, including those known in the art (See e.g., EP2100949).

[0205] In some embodiments, the cleaning compositions of the present invention contain at least one chelating agent. Suitable chelating agents include, but are not limited to copper, iron and/or manganese chelating agents and mixtures thereof. In embodiments in which at least one chelating agent is used, the cleaning compositions of the present invention comprise from about 0.1 to about 15% or even from about 3.0 to about 10% chelating agent by weight of the subject cleaning composition.

[0206] In some still further embodiments, the cleaning compositions provided herein contain at least one deposition aid. Suitable deposition aids include, but are not limited to, polyethylene glycol, polypropylene glycol, polycarboxylate, soil release polymers such as polytelephthalic acid, clays such as kaolinite, montmorillonite, atapulgite, illite, bentonite, halloysite, and mixtures thereof.

[0207] As indicated herein, in some embodiments, anti-redeposition agents find use in some embodiments of the present invention. In some embodiments, non-ionic surfactants find use. For example, in automatic dishwashing embodiments, non-ionic surfactants find use for surface modification purposes, in particular for sheeting, to avoid filming and spotting and to improve shine. These non-ionic surfactants also find use in preventing the re-deposition of soils. In some embodiments, the anti-redeposition agent is a non-ionic surfactant as known in the art (See e.g., EP2100949).

[0208] In some embodiments, the cleaning compositions of the present invention include one or more dye transfer inhibiting agents. Suitable polymeric dye transfer inhibiting agents include, but are not limited to, polyvinylpyrrolidone polymers, polyamine N-oxide polymers, copolymers of N-vinylpyrrolidone and N-vinylimidazole, polyvinyloxazolidones and polyvinylimidazoles or mixtures thereof. In embodiments in which at least one dye transfer inhibiting agent is used, the cleaning compositions of the present invention comprise from about 0.0001 to about 10%, from about 0.01 to about 5%, or even from about 0.1 to about 3% by weight of the cleaning composition.

[0209] In some embodiments, silicates are included within the compositions of the present invention. In some such embodiments, sodium silicates (e.g., sodium disilicate, sodium metasilicate, and crystalline phyllosilicates) find use. In some embodiments, silicates are present at a level of from about 1 to about 20%. In some embodiments, silicates are present at a level of from about 5 to about 15% by weight of the composition.

[0210] In some still additional embodiments, the cleaning compositions of the present invention also contain dispersants. Suitable water-soluble organic materials include, but are not limited to the homo- or co-polymeric acids or their salts, in which the polycarboxylic acid comprises at least two carboxyl radicals separated from each other by not more than two carbon atoms.

[0211] In some further embodiments, the enzymes used in the cleaning compositions are stabilized by any suitable technique. In some embodiments, the enzymes employed herein are stabilized by the presence of water-soluble sources of calcium and/or magnesium ions in the finished compositions that provide such ions to the enzymes. In some embodiments, the enzyme stabilizers include oligosaccharides, polysaccharides, and inorganic divalent metal salts, including alkaline earth metals, such as calcium salts. It is contemplated that various techniques for enzyme stabilization will find use in the present invention. For example, in some embodiments, the enzymes employed herein are stabilized by the presence of water-soluble sources of zinc (II), calcium (II) and/or magnesium (II) ions in the finished compositions that provide such ions to the enzymes, as well as other metal ions (e.g., barium (II), scandium (II), iron (II), manganese (II), aluminum (III), Tin (II), cobalt (II), copper (II), nickel (II), and oxovanadium (IV). Chlorides and sulfates also find use in some embodiments of the present invention. Examples of suitable oligosaccharides and polysaccharides (e.g., dextrins) are known in the art (See e.g., WO07/145964). In some embodiments, reversible protease inhibitors also find use, such as boron-containing compounds (e.g., borate, 4-formyl phenyl boronic acid) and/or a tripeptide aldehyde find use to further improve stability, as desired.

[0212] In some embodiments, bleaches, bleach activators and/or bleach catalysts are present in the compositions of the present invention. In some embodiments, the cleaning compositions of the present invention comprise inorganic and/or organic bleaching compound(s). Inorganic bleaches include, but are not limited to perhydrate salts (e.g., perborate, percarbonate, perphosphate, persulfate, and persilicate salts). In some embodiments, inorganic perhydrate salts are alkali metal salts. In some embodiments, inorganic perhydrate salts are included as the crystalline solid, without additional protection, although in some other embodiments, the salt is coated. Any suitable salt known in the art finds use in the present invention (See e.g., EP2100949).

[0213] In some embodiments, bleach activators are used in the compositions of the present invention. Bleach activators are typically organic peracid precursors that enhance the bleaching action in the course of cleaning at temperatures of 60° C. and below. Bleach activators suitable for use herein include compounds which, under perhydrolysis conditions, give aliphatic peroxoycarboxylic acids having preferably from about 1 to about 10 carbon atoms, in particular from about 2 to about 4 carbon atoms, and/or optionally substituted perbenzoic acid. Additional bleach activators are known in the art and find use in the present invention (See e.g., EP2100949).

[0214] In addition, in some embodiments and as further described herein, the cleaning compositions of the present invention further comprise at least one bleach catalyst. In some embodiments, the manganese triazacyclononane and related complexes find use, as well as cobalt, copper, manganese, and iron complexes. Additional bleach catalysts find use in the present invention (See e.g., U.S. Pat. Nos. 4,246,612, 5,227,084, and 4,810,410, and WO 99/06521 and EP2100949).

[0215] In some embodiments, the cleaning compositions of the present invention contain one or more catalytic metal complexes. In some embodiments, a metal-containing bleach catalyst finds use. In some embodiments, the metal bleach catalyst comprises a catalyst system comprising a transition metal cation of defined bleach catalytic activity, (e.g., copper, iron, titanium, ruthenium, tungsten, molybdenum, or manganese cations), an auxiliary metal cation having little or no bleach catalytic activity (e.g., zinc or aluminum cations), and a sequestrate having defined stability constants for the catalytic and auxiliary metal cations, particularly ethylenediaminetetraacetic acid, ethylenediaminetetra (methylenephosphonic acid) and water-soluble salts thereof are used (See e.g., U.S. Pat. No. 4,430,243). In some embodiments, the cleaning compositions of the present invention are catalyzed by means of a manganese compound. Such compounds and levels of use are well known in the art (See e.g., U.S. Pat. No. 5,576,282). In additional embodiments, cobalt bleach catalysts find use in the cleaning compositions of the present invention. Various cobalt bleach catalysts are known in the art (See e.g., U.S. Pat. Nos. 5,597,936 and 5,595,967) and are readily prepared by known procedures.

[0216] In some additional embodiments, the cleaning compositions of the present invention include a transition metal complex of a macropolycyclic rigid ligand (MRL). As a practical matter, and not by way of limitation, in some embodiments, the compositions and cleaning processes provided by the present invention are adjusted to provide on the order of at least one part per hundred million of the active MRL species in the aqueous washing medium, and in some embodiments, provide from about 0.005 ppm to about 25 ppm, more preferably from about 0.05 ppm to about 10 ppm, and most preferably from about 0.1 ppm to about 5 ppm, of the MRL in the wash liquor.

[0217] In some embodiments, transition-metals in the instant transition-metal bleach catalyst include, but are not limited to manganese, iron and chromium. MRLs also include, but are not limited to special ultra-rigid ligands that are cross-bridged (e.g., 5,12-diethyl-1,5,8,12-tetraazabicyclo[6.6.2]hexadecane). Suitable transition metal MRLs are readily prepared by known procedures (See e.g., WO 2000/32601, and U.S. Pat. No. 6,225,464).

[0218] In some embodiments, the cleaning compositions of the present invention comprise metal care agents. Metal care agents find use in preventing and/or reducing the tarnishing, corrosion, and/or oxidation of metals, including aluminum, stainless steel, and non-ferrous metals (e.g., silver and copper). Suitable metal care agents include those described in EP2100949, WO9426860 and WO9426859). In some embodiments, the metal care agent is a zinc salt. In some further embodiments, the cleaning compositions of the present invention comprise from about 0.1% to about 5% by weight of one or more metal care agent.

[0219] In some embodiments, the cleaning composition is a high density liquid (HDL) composition having a variant LG12 protease. The HDL liquid laundry detergent can comprise a detersive surfactant (10-40%) comprising anionic detersive surfactant (selected from a group of linear or branched or random chain, substituted or unsubstituted alkyl sulphates, alkyl sulphonates, alkyl alkoxylated sulphate, alkyl phosphates, alkyl phosphonates, alkyl carboxylates, and/or mixtures thereof): and optionally non-ionic surfactant (selected from a group of linear or branched or random chain, substituted or unsubstituted alkyl alkoxylated alcohol, for example a C₈-C₁₈ alkyl ethoxylated alcohol and/or C₆-C₁₂ alkyl phenol alkoxylates), optionally wherein the weight ratio of anionic detersive surfactant (with a hydrophilic index (HIc) of from 6.0-9) to non-ionic detersive surfactant is greater than 1:1.

[0220] The composition can comprise optionally, a surfactancy boosting polymer consisting of amphiphilic alkoxylated grease cleaning polymers (selected from a group of alkoxylated polymers having branched hydrophilic and hydrophobic properties, such as alkoxylated polyalkylenimines in the range of 0.05-10 wt %) and/or random graft polymers (typically comprising of hydrophilic backbone comprising monomers selected from the group consisting of: unsaturated C₁-C₆ carboxylic acids, ethers, alcohols, aldehydes, ketones, esters, sugar units, alkoxy units, maleic anhydride, saturated polyalcohols such as glycerol, and mixtures thereof; and hydrophobic side chain(s) selected from the group consisting of: C₄-C₂ alkyl group, polypropylene, polybutylene, vinyl ester of a saturated C₁-C₆ mono-carboxylic acid, C₁-C₆ alkyl ester of acrylic or methacrylic acid, and mixtures thereof.

[0221] The composition can comprise additional polymers such as soil release polymers (include anionically end-capped polyesters, for example SRP1, polymers comprising at least one monomer unit selected from saccharide, dicarboxylic acid, polyol and combinations thereof, in random or block configuration, ethylene terephthalate-based polymers and co-polymers thereof in random or block configuration, for example Repel-o-tex SF, SF-2 and SRP6, Texcare SRA100, SRA300, SRN100. SRN170, SRN240. SRN300 and SRN325, Marloquest SL), anti-redeposition polymers (0.1 wt % to 10 wt %, include carboxylate polymers, such as polymers comprising at least one monomer selected from acrylic acid, maleic acid (or maleic anhydride), fumaric acid, itaconic acid, aconitic acid, mesaconic acid, citraconic acid, methylenemalonic acid, and any mixture thereof, vinylpyrrolidone homopolymer, and/or polyethylene glycol, molecular weight in the range of from 500 to 100,000 Da): cellulosic polymer (including those selected from alkyl cellulose, alkyl alkoxyalkyl cellulose, carboxyalkyl cellulose, alkyl carboxyalkyl cellulose examples of which include carboxymethyl cellulose, methyl cellulose, methyl hydroxyethyl cellulose, methyl carboxymethyl cellulose, and mixures thereof) and polymeric carboxylate (such as maleate/acrylate random copolymer or polyacrylate homopolymer).

[0222] The composition can further comprise saturated or unsaturated fatty acid, preferably saturated or unsaturated C₁₂-C₂₄ fatty acid (0-10 wt %): deposition aids (examples for which include polysaccharides, preferably cellulosic polymers, poly diallyl dimethyl ammonium halides (DADMAC), and co-polymers of DAD MAC with vinyl pyrrolidone, acrylamides, imidazoles, imidazolinium halides, and mixtures thereof, in random or block configuration, cationic guar gum, cationic cellulose such as cationic hydoxyethyl cellulose, cationic starch, cationic polyacylamides, and mixtures thereof.

[0223] The composition can further comprise dye transfer inhibiting agents examples of which include manganese phthalocyanine, peroxidases, polyvinylpyrrolidone polymers, polyamine N-oxide polymers, copolymers of N-vinylpyrrolidone and N-vinylimidazole, polyvinyloxazolidones and polyvinylimidazoles and/or mixtures thereof; chelating agents examples of which include ethylene-diamine-tetraacetic acid (EDTA); diethylene triamine penta methylene phosphonic acid (DTPMP); hydroxy-ethane diphosphonic acid (HEDP); ethylenediamine N,N′-disuccinic acid (EDDS); methyl glycine diacetic acid (MGDA); diethylene triamine penta acetic acid (DTPA): propylene diamine tetracetic acid (PDT A); 2-hydroxypyridine-N-oxide (HPNO); or methyl glycine diacetic acid (MGDA); glutamic acid N,N-diacetic acid (N,N-dicarboxymethyl glutamic acid tetrasodium salt (GLDA); nitrilotriacetic acid (NTA); 4,5-dihydroxy-m-benzenedisulfonic acid; citric acid and any salts thereof; N-hydroxyethylethylenediaminetri-acetic acid (HEDTA), triethylenetetraaminehexaacetic acid (TTHA), N-hydroxyethyliminodiacetic acid (HEIDA), dihydroxyethylglycine (DHEG), ethylenediaminetetrapropionic acid (EDTP) and derivatives thereof.

[0224] The composition can further comprise enzymes (0.01-0.03 wt % active enzyme) selected from a group of proteases; amylases; lipases; cellulases; choline oxidases; peroxidases/oxidases; pectate lyases; mannanases; cutinases: laccases; phospholipases; lysophospholipases: acyltransferase: perhydrolase; arylesterase and any mixture thereof. The composition may comprise an enzyme stabilizer (examples of which include polyols such as propylene glycol or glycerol, sugar or sugar alcohol, lactic acid, reversible protease inhibitor, boric acid, or a boric acid derivative, e.g., an aromatic borate ester, or a phenyl boronic acid derivative such as 4-formylphenyl boronic acid).

[0225] The composition can further comprise silicone or fatty-acid based suds suppressors: heuing dyes, calcium and magnesium cations, visual signaling ingredients, anti-foam (0.001-4.0 wt %), and/or structurant/thickener (0.01-5 wt %, selected from the group consisting of diglycerides and triglycerides, ethylene glycol distearate, microcrystalline cellulose, cellulose based materials, microfiber cellulose, biopolymers, xanthan gum, gellan gum, and mixtures thereof).

[0226] Suitable detersive surfactants also include cationic detersive surfactants (selected from a group of alkyl pyridinium compounds, alkyl quarternary ammonium compounds, alkyl quarternary phosphonium compounds, alkyl ternary sulphonium compounds, and/or mixtures thereof); zwitterionic and/or amphoteric detersive surfactants (selected from a group of alkanolamine sulpho-betaines): ampholytic surfactants; semi-polar non-ionic surfactants and mixtures thereof.

[0227] The composition can be any liquid form, for example a liquid or gel form, or any combination thereof. The composition may be in any unit dose form, for example a pouch.

[0228] In some embodiments, the cleaning composition is a HDD composition having a variant LG12 protease. The HDD laundry detergent can comprise a detersive surfactant including anionic detersive surfactants (selected from a group of linear or branched or random chain, substituted or unsubstituted alkyl sulphates, alkyl sulphonates, alkyl alkoxylated sulphate, alkyl phosphates, alkyl phosphonates, alkyl carboxylates and/or mixtures thereof), non-ionic detersive surfactant (selected from a group of linear or branched or random chain, substituted or unsubstituted C₈-C₁₈ alkyl ethoxylates, and/or C₆-C₁₂ alkyl phenol alkoxylates), cationic detersive surfactants (selected from a group of alkyl pyridinium compounds, alkyl quaternary ammonium compounds, alkyl quaternary phosphonium compounds, alkyl ternary sulphonium compounds, and mixtures thereof), zwitterionic and/or amphoteric detersive surfactants (selected from a group of alkanolamine sulpho-betaines); ampholytic surfactants; semi-polar non-ionic surfactants and mixtures thereof; builders (phosphate free builders [for example zeolite builders examples of which include zeolite A, zeolite X, zeolite P and zeolite MAP in the range of 0 to less than 10 wt %]; phosphate builders [examples of which include sodium tri-polyphosphate in the range of 0 to less than 10 wt %]; citric acid, citrate salts and nitrilotriacetic acid or salt thereof in the range of less than 15 wt %): silicate salt (sodium or potassium silicate or sodium meta-silicate in the range of 0 to less than 10 wt %, or layered silicate (SKS-6)): carbonate salt (sodium carbonate and/or sodium bicarbonate in the range of 0 to less than 10 wt %); and bleaching agents (photobleaches, examples of which include sulfonated zinc phthalocyanines, sulfonated aluminum phthalocyanines, xanthenes dyes, and mixtures thereof: hydrophobic or hydrophilic bleach activators (examples of which include dodecanoyl oxybenzene sulfonate, decanoyl oxybenzene sulfonate, decanoyl oxybenzoic acid or salts thereof, 3,5,5-trimethy hexanoyl oxybenzene sulfonate, tetraacetyl ethylene diamine-TAED, and nonanoyloxybenzene sulfonate-NOBS, nitrile quats, and mixtures thereof: hydrogen peroxide; sources of hydrogen peroxide (inorganic perhydrate salts examples of which include mono or tetra hydrate sodium salt of perborate, percarbonate, persulfate, perphosphate, or persilicate); preformed hydrophilic and/or hydrophobic peracids (selected from a group consisting of percarboxylic acids and salts, percarbonic acids and salts, perimidic acids and salts, peroxymonosulfuric acids and salts) & mixtures thereof and/or bleach catalyst (such as imine bleach boosters examples of which include iminium cations and polyions; iminium zwitterions; modified amines; modified amine oxides; N-sulphonyl imines; N-phosphonyl imines: N-acyl imines; thiadiazole dioxides: perfluoroimines; cyclic sugar ketones and mixtures thereof; metal-containing bleach catalyst for example copper, iron, titanium, ruthenium, tungsten, molybdenum, or manganese cations along with an auxiliary metal cations such as zinc or aluminum and a sequestrate such as ethylenediaminetetraacetic acid, ethylenediaminetetra(methylenephosphonic acid) and water-soluble salts thereof).

[0229] The composition can further comprise enzymes selected from a group of proteases; amylases; lipases: cellulases: choline oxidases; peroxidases/oxidases; pectate lyases; mannanases; cutinases: laccases; phospholipases; lysophospholipases; acyltransferase: perhydrolase: arylesterase and any mixture thereof.

[0230] The composition can further comprise additional detergent ingredients including perfume microcapsules, starch encapsulated perfume accord, hueing agents, additional polymers including fabric integrity and cationic polymers, dye lock ingredients, fabric-softening agents, brighteners (for example C.I. Fluorescent brighteners), flocculating agents, chelating agents, alkoxylated polyamines, fabric deposition aids, and/or cyclodextrin.

[0231] In some embodiments, the cleaning composition is an automatic dishwashing (ADW) detergent composition having a variant LG12 protease. The ADW detergent can comprise two or more non-ionic surfactants selected from a group of ethoxylated non-ionic surfactants, alcohol alkoxylated surfactants, epoxy-capped poly(oxyalkylated) alcohols, or amine oxide surfactants present in amounts from 0-10% by weight; builders in the range of 5-60% comprising either phosphate (mono-phosphates, di-phosphates, tri-polyphosphates or oligomeric-poylphosphates, preferred sodium tripolyphosphate-STPP or phosphate-free builders [amino acid based compounds, examples of which include MGDA (methyl-glycine-diacetic acid), and salts and derivatives thereof, GLDA (glutamic-N,Ndiacetic acid) and salts and derivatives thereof. IDS (iminodisuccinic acid) and salts and derivatives thereof, carboxy methyl inulin and salts and derivatives thereof and mixtures thereof, nitrilotriacetic acid (NTA), diethylene triamine penta acetic acid (DTPA), B-alaninediacetic acid (B-ADA) and their salts], homopolymers and copolymers of poly-carboxylic acids and their partially or completely neutralized salts, monomeric polycarboxylic acids and hydroxycarboxylic acids and their salts in the range of 0.5-50% by weight: sulfonatedcarboxylated polymers (provide dimensional stability to the product) in the range of about 0.1 to about 50% by weight; drying aids in the range of about 0.1 to about 10% by weight (selected from polyesters, especially anionic polyesters optionally together with further monomers with 3 to 6 functionalities which are conducive to polycondensation, specifically acid, alcohol or ester functionalities, polycarbonate-, polyurethane- and/or polyurea-polyorganosiloxane compounds or precursor compounds thereof of the reactive cyclic carbonate and urea type); silicates in the range from about 1 to about 20% by weight (sodium or potassium silicates for example sodium disilicate, sodium meta-silicate and crystalline phyllosilicates); bleach-inorganic (for example perhydrate salts such as perborate, percarbonate, perphosphate, persulfate and persilicate salts) and organic (for example organic peroxyacids including diacyl and tetraacylperoxides, especially diperoxydodecanedioc acid, diperoxytetradecanedioc acid, and diperoxyhexadecanedioc acid); bleach activators—organic peracid precursors in the range from about 0.1 to about 10% by weight; bleach catalysts (selected from manganese triazacyclononane and related complexes, Co, Cu, Mn and Fe bispyridylamine and related complexes, and pentamine acetate cobalt(III) and related complexes); metal care agents in the range from about 0.1 to 5% by weight (selected from benzatriazoles, metal salts and complexes, and/or silicates); enzymes in the range from about 0.01 to 5.0 mg of active enzyme per gram of automatic dishwashing detergent composition (selected from a group of proteases; amylases; lipases; cellulases: choline oxidases; peroxidases/oxidases: pectate lyases; mannanases; cutinases; laccases: phospholipases; lysophospholipases; acyltransferase; perhydrolase; arylesterase and any mixture thereof); and enzyme stabilizer components (selected from oligosaccharides, polysaccharides and inorganic divalent metal salts).

[0232] Representative detergent formulations that beneficially include a serine protease polypeptide of the present invention include the detergent formulations found in WO2013063460, pages 78-152, and in particular the tables of pages 94-152 are hereby incorporated by reference. The serine proteases are normally incorporated into the detergent composition at a level of from 0.00001-10% of enzyme protein by weight of the composition. In some embodiments, the detergent composition comprises more than 0.0001%, 0.001%, 0.01%, or 0.1% of the serine protease by weight of the composition. In some embodiments, the detergent composition comprises less than 1%, 0.1%, 0.01%, or 0.001% of the serine protease by weight of the composition.

[0233] The cleaning compositions of the present invention are formulated into any suitable form and prepared by any process chosen by the formulator, non-limiting examples of which are described in U.S. Pat. Nos. 5,879,584, 5,691,297, 5,574,005, 5,569,645, 5,516,448, 5,489,392, and 5,486,303, all of which are incorporated herein by reference. In some embodiments in which a low pH cleaning composition is desired, the pH of such composition is adjusted via the addition of an acidic material such as HCl.

[0234] The cleaning compositions disclosed herein of find use in cleaning a situs (e.g., a surface, item, dishware, or fabric). Typically, at least a portion of the situs is contacted with an embodiment of the present cleaning composition, in neat form or diluted in wash liquor, and then the situs is optionally washed and/or rinsed. For purposes of the present invention, “washing” includes but is not limited to, scrubbing, and mechanical agitation. In some embodiments, the cleaning compositions are typically employed at concentrations of from about 500 ppm to about 15.000 ppm in solution. When the wash solvent is water, the water temperature typically ranges from about 5° C. to about 90° C. and, when the situs comprises a fabric, the water to fabric mass ratio is typically from about 1:1 to about 30:1.

[0235] The cleaning compositions of the present invention are formulated into any suitable form and prepared by any suitable process chosen by the formulator, (See e.g., U.S. Pat. Nos. 5,879,584, 5,691,297, 5,574,005, 5,569,645, 5,565,422, 5,516,448, 5,489,392, 5,486,303, 4,515,705, 4,537,706, 4,515,707, 4,550,862, 4,561,998, 4,597,898, 4,968,451, 5,565,145, 5,929,022, 6,294,514 and 6,376,445).

[0236] In some embodiments, the cleaning compositions of the present invention are provided in unit dose form, including tablets, capsules, sachets, pouches, and multi-compartment pouches. In some embodiments, the unit dose format is designed to provide controlled release of the ingredients within a multi-compartment pouch (or other unit dose format). Suitable unit dose and controlled release formats are known in the art (See e.g., EP 2100949, WO02/102955, U.S. Pat. Nos. 4,765,916 and 4,972,017, and WO 04/111178 for materials suitable for use in unit dose and controlled release formats). In some embodiments, the unit dose form is provided by tablets wrapped with a water-soluble film or water-soluble pouches. Various formats for unit doses are provided in EP2100947, and are known in the art.

[0237] In some embodiments, the cleaning compositions of the present invention find use in cleaning surfaces (e.g., dishware), laundry, hard surfaces, contact lenses, etc. In some embodiments, at least a portion of the surface is contacted with at least one embodiment of the cleaning compositions of the present invention, in neat form or diluted in wash liquor, and then the surface is optionally washed and/or rinsed. For purposes of the present invention, “washing” includes, but is not limited to, scrubbing, and mechanical washing. In some embodiments, the cleaning compositions of the present invention are used at concentrations of from about 500 ppm to about 15,000 ppm in solution. In some embodiments in which the wash solvent is water, the water temperature typically ranges from about 5° C. to about 90° C.

[0238] The present invention provides methods for cleaning or washing an item or surface (e.g., hard surface) in need of cleaning, including, but not limited to methods for cleaning or washing a dishware item, a tableware item, a fabric item, a laundry item, personal care item, etc., or the like, and methods for cleaning or washing a hard or soft surface (e.g., a hard surface of an item).

[0239] In some embodiments, the present invention provides a method for cleaning an item, object, or surface in need of cleaning, the method comprising contacting the item or surface (or a portion of the item or surface desired to be cleaned) with at least one variant LG12 protease of the present invention or a composition of the present invention for a sufficient time and/or under conditions suitable and/or effective to clean the item, object, or surface to a desired degree. Some such methods further comprise rinsing the item, object, or surface with water. For some such methods, the cleaning composition is a dishwashing detergent composition and the item or object to be cleaned is a dishware item or tableware item. As used herein, a “dishware item” is an item generally used in serving or eating food. A dishware item can be, but is not limited to for example, a dish, plate, cup, bowl, etc., and the like. As used herein, “tableware” is a broader term that includes, but is not limited to for example, dishes, cutlery, knives, forks, spoons, chopsticks, glassware, pitchers, sauce boats, drinking vessels, serving items, etc. It is intended that “tableware item” includes any of these or similar items for serving or eating food. For some such methods, the cleaning composition is an automatic dishwashing detergent composition or a hand dishwashing detergent composition and the item or object to be cleaned is a dishware or tableware item. For some such methods, the cleaning composition is a laundry detergent composition (e.g., a power laundry detergent composition or a liquid laundry detergent composition), and the item to be cleaned is a fabric item. In some other embodiments, the cleaning composition is a laundry pre-treatment composition.

[0240] In some embodiments, the present invention provides methods for cleaning or washing a fabric item optionally in need of cleaning or washing, respectively. In some embodiments, the methods comprise providing a composition comprising the variant protease, including but not limited to fabric or laundry cleaning composition, and a fabric item or laundry item in need of cleaning, and contacting the fabric item or laundry item (or a portion of the item desired to be cleaned) with the composition under conditions sufficient or effective to clean or wash the fabric or laundry item to a desired degree.

[0241] In some embodiments, the present invention provides a method for cleaning or washing an item or surface (e.g., hard surface) optionally in need of cleaning, the method comprising providing an item or surface to be cleaned or washed and contacting the item or surface (or a portion of the item or surface desired to be cleaned or washed) with at least one LG12 variant of the invention or a composition of the invention comprising at least one such LG12 variant for a sufficient time and/or under conditions sufficient or effective to clean or wash the item or surface to a desired degree. Such compositions include, but are not limited to for example, a cleaning composition or detergent composition of the invention (e.g., a hand dishwashing detergent composition, hand dishwashing cleaning composition, laundry detergent or fabric detergent or laundry or fabric cleaning composition, liquid laundry detergent, liquid laundry cleaning composition, powder laundry detergent composition, powder laundry cleaning composition, automatic dishwashing detergent composition, laundry booster cleaning or detergent composition, laundry cleaning additive, and laundry pre-spotter composition, etc.). In some embodiments, the method is repeated one or more times, particularly if additional cleaning or washing is desired. For example, in some instance, the method optionally further comprises allowing the item or surface to remain in contact with the at least one variant protease or composition for a period of time sufficient or effective to clean or wash the item or surface to the desired degree. In some embodiments, the methods further comprise rinsing the item or surface with water and/or another liquid. In some embodiments, the methods further comprise contacting the item or surface with at least one variant protease of the invention or a composition of the invention again and allowing the item or surface to remain in contact with the at least one variant protease or composition for a period of time sufficient to clean or wash the item or surface to the desired degree. In some embodiments, the cleaning composition is a dishwashing detergent composition and the item to be cleaned is a dishware or tableware item. In some embodiments of the present methods, the cleaning composition is an automatic dishwashing detergent composition or a hand dishwashing detergent composition and the item to be cleaned is a dishware or tableware item. In some embodiments of the methods, the cleaning composition is a laundry detergent composition and the item to be cleaned is a fabric item.

[0242] The present invention also provides methods of cleaning a tableware or dishware item in an automatic dishwashing machine, the method comprising providing an automatic dishwashing machine, placing an amount of an automatic dishwashing composition comprising at least one LG12 variant of the present invention or a composition of the invention sufficient to clean the tableware or dishware item in the machine (e.g., by placing the composition in an appropriate or provided detergent compartment or dispenser in the machine), putting a dishware or tableware item in the machine, and operating the machine so as to clean the tableware or dishware item (e.g., as per the manufacturer's instructions). In some embodiments, the methods include any automatic dishwashing composition described herein, which comprises, but is not limited to at least one LG12 variant provided herein. The amount of automatic dishwashing composition to be used can be readily determined according to the manufacturer's instructions or suggestions and any form of automatic dishwashing composition comprising at least one variant protease of the invention (e.g., liquid, powder, solid, gel, tablet, etc.), including any described herein, may be employed.

[0243] The present invention also provides methods for cleaning a surface, item or object optionally in need of cleaning, the method comprises contacting the item or surface (or a portion of the item or surface desired to be cleaned) with at least one variant LG12 of the present invention or a cleaning composition of the invention in neat form or diluted in a wash liquor for a sufficient time and/or under conditions sufficient or effective to clean or wash the item or surface to a desired degree. The surface, item, or object may then be (optionally) washed and/or rinsed if desired. For purposes of the present invention, “washing” includes, but is not limited to for example, scrubbing and mechanical agitation. In some embodiments, the cleaning compositions are employed at concentrations of from about 500 ppm to about 15,000 ppm in solution (e.g., aqueous solution). When the wash solvent is water, the water temperature typically ranges from about 5° C. to about 90° C.

[0244] The present invention also provides methods of cleaning a laundry or fabric item in an washing machine, the method comprising providing an washing machine, placing an amount of a laundry detergent composition comprising at least one variant LG12 of the invention sufficient to clean the laundry or fabric item in the machine (e.g., by placing the composition in an appropriate or provided detergent compartment or dispenser in the machine), placing the laundry or fabric item in the machine, and operating the machine so as to clean the laundry or fabric item (e.g., as per the manufacturer's instructions). The methods of the present invention include any laundry washing detergent composition described herein, comprising but not limited to at least one of any variant LG12 provided herein. The amount of laundry detergent composition to be used can be readily determined according to manufacturer's instructions or suggestions and any form of laundry detergent composition comprising at least one variant protease of the invention (e.g., solid, powder, liquid, tablet, gel, etc.), including any described herein, may be employed.

[0245] In a further aspect of the invention, the LG-12 clade protease polypeptides of the present invention can be used as a component of an animal feed composition, animal feed additive and/or pet food comprising a LG-12 clade protease and variants thereof. The present invention further relates to a method for preparing such an animal feed composition, animal feed additive composition and/or pet food comprising mixing the LG-12 clade protease polypeptide with one or more animal feed ingredients and/or animal feed additive ingredients and/or pet food ingredients. Furthermore, the present invention relates to the use of the LG-12 clade protease polypeptide in the preparation of an animal feed composition and/or animal feed additive composition and/or pet food.

[0246] The term “animal” includes all non-ruminant and ruminant animals. In a particular embodiment, the animal is a non-ruminant animal, such as a horse and a mono-gastric animal. Examples of mono-gastric animals include, but are not limited to, pigs and swine, such as piglets, growing pigs, sows; poultry such as turkeys, ducks, chicken, broiler chicks, layers; fish such as salmon, trout, tilapia, catfish and carps; and crustaceans such as shrimps and prawns. In a further embodiment the animal is a ruminant animal including, but not limited to, cattle, young calves, goats, sheep, giraffes, bison, moose, elk, yaks, water buffalo, deer, camels, alpacas, llamas, antelope, pronghorn and nilgai.

[0247] In the present context, it is intended that the term “pet food” is understood to mean a food for a household animal such as, but not limited to, dogs, cats, gerbils, hamsters, chinchillas, fancy rats, guinea pigs; avian pets, such as canaries, parakeets, and parrots, reptile pets, such as turtles, lizards and snakes: and aquatic pets, such as tropical fish and frogs.

[0248] The terms “animal feed composition.” “feedstuff” and “fodder” are used interchangeably and can comprise one or more feed materials selected from the group comprising a) cereals, such as small grains (e.g., wheat, barley, rye, oats and combinations thereof) and/or large grains such as maize or sorghum; b) by products from cereals, such as corn gluten meal, Distillers Dried Grain Solubles (DDGS) (particularly corn based Distillers Dried Grain Solubles (cDDGS), wheat bran, wheat middlings, wheat shorts, rice bran, rice hulls, oat hulls, palm kernel, and citrus pulp; c) protein obtained from sources such as soya, sunflower, peanut, lupin, peas, fava beans, cotton, canola, fish meal, dried plasma protein, meat and bone meal, potato protein, whey, copra, sesame; d) oils and fats obtained from vegetable and animal sources; e) minerals and vitamins.

[0249] Also contemplated are compositions and methods of treating fabrics (e.g., to desize a textile) using a LG-12 clade protease polypeptide of the present invention. Fabric-treating methods are well known in the art (see, e.g., U.S. Pat. No. 6,077,316). For example, the feel and appearance of a fabric can be improved by a method comprising contacting the fabric with a LG-2 clade protease in a solution. The fabric can be treated with the solution under pressure.

[0250] A LG-12 clade protease of the present invention can be applied during or after the weaving of a textile, or during the desizing stage, or one or more additional fabric processing steps. During the weaving of textiles, the threads are exposed to considerable mechanical strain. Prior to weaving on mechanical looms, warp yarns are often coated with sizing starch or starch derivatives to increase their tensile strength and to prevent breaking. A LG-12 clade protease of the present invention can be applied during or after the weaving to remove starch or starch derivatives. After weaving, the LG-12 clade protease can be used to remove the size coating before further processing the fabric to ensure a homogeneous and wash-proof result.

[0251] A LG-12 clade protease of the present invention can be used alone or with other desizing chemical reagents and/or desizing enzymes to desize fabrics, including cotton-containing fabrics, as detergent additives, e.g., in aqueous compositions. An amylase also can be used in compositions and methods for producing a stonewashed look on indigo-dyed denim fabric and garments. For the manufacture of clothes, the fabric can be cut and sewn into clothes or garments, which are afterwards finished. In particular, for the manufacture of denim jeans, different enzymatic finishing methods have been developed. The finishing of denim garment normally is initiated with an enzymatic desizing step, during which garments are subjected to the action of proteolytic enzymes to provide softness to the fabric and make the cotton more accessible to the subsequent enzymatic finishing steps. The LG-12 clade protease can be used in methods of finishing denim garments (e.g., a “bio-stoning process”), enzymatic desizing and providing softness to fabrics, and/or finishing process.

[0252] The LG-12 clade protease polypeptides described herein find further use in the enzyme aided bleaching of paper pulps such as chemical pulps, semi-chemical pulps, kraft pulps, mechanical pulps or pulps prepared by the sulfite method. In general terms, paper pulps are incubated with a LG-12 clade protease polypeptide of the present invention under conditions suitable for bleaching the paper pulp. In some embodiments, the pulps are chlorine free pulps bleached with oxygen, ozone, peroxide or peroxyacids. In some embodiments, the LG-12 clade protease polypeptides are used in enzyme aided bleaching of pulps produced by modified or continuous pulping methods that exhibit low lignin contents. In some other embodiments, the LG-12 clade protease polypeptides are applied alone or preferably in combination with xylanase and/or endoglucanase and/or alpha-galactosidase and/or cellobiohydrolase enzymes.

[0253] The LG-12 clade protease polypeptides described herein find further use in the enzyme aided removal of proteins from animals and their subsequent degradation or disposal, such as feathers, skin, hair, hide, and the like. In some instances, immersion of the animal carcass in a solution comprising a LG-2 clade protease polypeptide of the present invention can act to protect the skin from damage in comparison to the traditional immersion in scalding water or the defeathering process. In one embodiment, feathers can be sprayed with an isolated polypeptide of the present invention under conditions suitable for digesting or initiating degradation of the plumage. In some embodiments, a LG-12 clade protease of the present invention can be used, as above, in combination with an oxidizing agent.

[0254] In some embodiments, removal of the oil or fat associated with raw feathers is assisted by using a LG-12 clade protease polypeptide of the present invention. In some embodiments, the LG-12 clade protease polypeptides are used in compositions for cleaning the feathers as well as to sanitize and partially dehydrate the fibers. In some other embodiments, the LG-12 clade protease polypeptides are applied in a wash solution in combination with 95% ethanol or other polar organic solvent with or without a surfactant at about 0.5% (v/v).

[0255] In yet other embodiments, the disclosed LG-12 clade protease polypeptides find use in recovering protein from plumage. In some embodiments, the recovered protein can be subsequently used in animal or fish feed.

[0256] The LG-12 clade protease polypeptides described herein find further use in the enzyme aided debridement of tissue. This involves the removal of dead or damaged tissue, for example, removal from wounds to aid in healing.

[0257] The LG-12 clade protease polypeptides described herein find further use in tissue culture. In particular, LG-12 clade proteases of the present invention can be used to suspend or resuspend cells adherent to a cell culture wall, such as during the process of harvesting cells. LG-12 clade proteases of the present invention can be used to cleave protein bonds between cultured cells and the dish, allowing cells to become suspended in solution.

[0258] The LG-12 clade protease polypeptides described herein find further use as a food additive, a digestive aide or a food processing aid.

[0259] The LG-12 clade protease polypeptides described herein find further use in leather processing by removing hair from animal hides, soaking, degreasing, or bating, which is a process involving degradation of non-structural proteins during leather making.

### EXAMPLE 1

### Assays

### Performance Index

[0260] The performance index (PI) of an enzyme compares the performance of the variant (measured value) with the parent enzyme (theoretical value or measured value) at the same protein concentration. Theoretical concentrations for the parent enzyme can be calculated using the parameters extracted from a Langmuir fit of a standard curve of the parent enzyme. A PI that is greater than 1 (PI>1) indicates improved performance by a variant as compared to a parent or benchmark protease (defined for each analyzed data set), while a PI of 1 (PI=1) identifies a variant that performs the same as the parent, and a PI that is less than 1 (PI<1) identifies a variant that performs worse than the parent.

### Protein Purification

[0261] Samples were dialyzed overnight against 25 mM MES, pH 5.4, 1 mM CaCl₂ buffer, and loaded on a 30 mL Source 15S column (GE Healthcare) equilibrated with same buffer. A gradient of 0 to 150 mM NaCl was run, and fractions were collected. Fractions containing target protein were pooled, concentrated, and formulated with 40% Propylene Glycol, and sterile filtered.

### Protease Activity Assays

[0262] The protease activity of wild-type LG12 protease and variants thereof was tested by measuring hydrolysis of N-suc-AAPF-pNA, dimethyl casein (DMC), or skim milk substrates.

[0263] The reagent solutions used for the AAPF hydrolysis assay were: 100 mM Tris/HCl pH 8.6, containing 0.005% TWEEN®-80 (Tris dilution buffer); 100 mM Tris buffer pH 8.6, containing 10 mM CaCl₂ and 0.005% TWEEN®-80 (Tris/Ca buffer); and 160 mM suc-AAPF-pNA in DMSO (suc-AAPF-pNA stock solution) (Sigma: S-7388). To prepare a substrate working solution, 1 ml suc-AAPF-pNA stock solution was added to 100 ml Tris/Ca buffer and mixed well. An enzyme sample was added to a MTP plate (Greiner 781101) containing 1 mg/suc-AAPF-pNA working solution and assayed for activity at 405 nm over 3 minutes using a SpectraMax plate reader in kinetic mode at RT. The protease activity was expressed as mOD·min⁻¹.

[0264] The reagent solutions used for the DMC assay were: 2.5% Dimethylcasein (DMC, Sigma) in 100 mM Sodium Carbonate pH 9.5, 0.075% TNBSA (2,4,6-trinitrobenzene sulfonic acid. Thermo Scientific) in Reagent A. Reagent A: 45.4 g Na₂B₄O₇.10H₂O (Merck) in 15 mL 4N NaOH to reach a final volume of 1000 mL in MQ water. Dilution Solution: 10 mM NaCl, 0.1 mM CaCl₂, 0.005% Tween-80, 0.02% Na-azide. MTPs (Greiner PS-microwell 384) were filled with 47.5 uL DMC substrate following the addition of 2.5 uL of 20 ppm protease supernatant. 50 uL of TNBSA in Reagent A was then added with slow mixing. Activity was measured at 405 nm over 5 min using a SpectraMax plate reader in kinetic mode at RT. Activity was expressed as mOD*min⁻¹.

[0265] The reagent solutions used for the skim milk assay were: 40 mg/mL BD Difco skim milk powder in 100 mM Tris, 0.005% Tween-80, pH 8.6 with 10 gpg hardness. The solution was equilibrated for 1 h before use. Activity was measured at 650 nm over 3 min using a SpectraMax plate reader in kinetic mode at RT. Activity was expressed as mOD*min-1.

### Detergents

[0266] Proteases were tested for cleaning performance and/or stability in detergents set forth in Table 1. All commercially available HDL laundry detergents except Persil non-Bio and Blue Moon were inactivated to remove enzyme activity by heating to 95° C. for 16 hours in a water bath. Protease activity was assayed following inactivation using the AAPF substrate to ensure complete inactivation. Commercially available HDD laundry detergents were inactivated to remove enzyme activity by preparing a 10× concentrated solution relative to what is used in the final cleaning assay and heating for 16 hours at 95° C. Protease activity was assayed following inactivation using the AAPF substrate. After heating the HDD and HDL detergents for 16 hours, protease activity was non-existent.

TABLE 1
Detergents

| NO. | NAME | TYPE | FORM |
|---|---|---|---|
| 1 | Kirkland Ultra (Sun Products)^{†} | Laundry | HDD |
| 2 | OMO Color (Unilever)^{†} | Laundry | HDD |
| 3 | Surf Excel (Henkel)^{†} | Laundry | HDD |
| 4 | OMO Klein & Krachtig (Unilever)^{†} | Laundry | HDL |
| 5 | Kirkland Ultraclean (Sun Products)^{†} | Laundry | HDL |
| 6 | Blue Moon (Guangzhou Blue Moon)^{†,}* | Laundry | HDL |
| 7 | All 3 (Sun Products)^{†,}* | Laundry | HDL |
| 8 | Purex Dirt Lift (Henkel)^{†,}* | Laundry | HDL |
| 9 | Persil Non-Bio (Unilever)^{†,}* | Laundry | HDL |
| 10 | Test HDL* | Laundry | HDL |
| 11 | GSM-B | Dish | Powder |

^{†}Commercially available detergent;
*Detergent with ≤5 mg/Kg boron

[0267] The composition of detergent number 10 is a custom-made in-house HDL detergent (“Test HDL”) having the composition set forth in Table 2A.

TABLE 2A
Test HDL Detergent Composition

| | | | Wt. | | |
|---|---|---|---|---|---|
| Component | Ingredient | Trade name | % | Amount(g) | |
| Solvent | Water (total) | — | 64.89 | 1297.8 | g |
| | C12-C15 Pareth-7 | Empilan KCL 7 | 3 | 60 | g |
| | (Sodium) | NANSA SSA F | 7.5 | 150 | g |
| | Dodecylbenzene- | | | | |
| | sulfonate | | | | |
| Surfactant | K-Cocoate | NANSA PC 38F | 3 | 60 | g |
| | Sodium Laureth | Empicol | 9 | 180 | g |
| | Sulfate | ESB3/M6 | | | |
| Builder | Sodium Citrate | Sodium Citrate | 3 | 60 | g |
| | | Tribasic | | | |
| | | Dihydrate | | | |
| Liquid | Sorbitol | D-Sorbitol | 0.8 | 16 | g |
| properties/ | Propylene glycol | 1,2-Propanediol | 2.5 | 50 | g |
| stability | Glycerin | Glycerol | 0.8 | 16 | g |
| | Triethanolamine | Triethanolamine | 0.5 | 10 | g |
| | Methyliso- | 2-Methyl-4- | 0.01 | 0.2 | g |
| | thiazolinone | isothiazolin-3-one | | | |
| | Ethanol | | 1 | 20 | g |
| Neutralizer | NaOH (4M) | | | 103.3 | mL |

[0268] The composition of detergent number 11, GSM-B phosphate-free detergent, was purchased from WFK Testgewebe GmbH, Briiggen, Deutschland (www.testgewebe.de) and has the composition set forth in Table 2B.

TABLE 2B
GSM-B ADW Detergent Composition

| Component | Wt % |
|---|---|
| Sodium citrate dehydrate | 30.0 |
| Maleic acid/acrylic acid copolymer sodium Salt | 12.0 |
| (SOKALAN ® CP5; BASF) | |
| Sodium perborate monohydrate | 5.0 |
| TAED | 2.0 |
| Sodium disilicate: Protil A (Cognis) | 25.0 |
| Linear fatty alcohol ethoxylate | 2.0 |
| Sodium carbonate anhydrous | add to 100 |

### Cleaning Performance in Detergent

[0269] Variants were tested for cleaning performance relative to wild-type LG12 or BPN′-Y217L protease on various microswatches: BMI (blood/milk/ink on cotton.—EMPA-116), egg yolk with pigment (aged by heat. CFT CS-38), and POM (pigment/oil/milk, CFT-C10), for laundry-based applications, and egg yolk (egg yolk on polyacryl fabric, aged and colored with carbon black dye. PAS-38) for dish-based applications. Pre-punched (to fit on MPT), rinsed, and filled swatch-containing plates (Corning 3641) were prepared by Center for Testmaterials BV, Vlaardingen. Netherlands. Detergent was added to the microswatch plates prior to enzyme addition. Prior to use, commercial detergents except Persil Non-Bio and Blue Moon were heat-inactivated to remove enzyme activity and then dosed as described in Table 3.

TABLE 3
List of Wash Conditions Used for Performance Assays

| | Final | | | | |
|---|---|---|---|---|---|
| | Wash | Hardness | | | |
| | Conc, | Conc. | | Set | |
| Detergent | (g/L) | (ppm) | Buffer | pH | Type |
| Kirkland | 1.1 | 150 | 2 mM NaCO₃ | 10.6 | Laundry |
| Ultra | | | | | |
| OMO Color | 5.3 | 250 | 2 mM NaCO₃ | 10.6 | Laundry |
| Surf Excel | 4 | 400 | 2 mM NaCO₃ | 10.6 | Laundry |
| Kirkland | 0.17 | 150 | 5 mM sodium | 8.2 | Laundry |
| Ultraclean | | | HEPES | | |
| OMO Klein & | 2.8 | 250 | 5 mM sodium | 8.2 | Laundry |
| Krachtig | | | HEPES | | |
| Persil | 2.7 | 250 | 5 mM sodium | 8 | Laundry |
| Non-Bio | | | HEPES | | |
| Test HDL | 7.5 | 250 | 5 mM sodium | 8 | Laundry |
| | | | HEPES | | |
| Blue Moon | 13 | 250 | 5 mM sodium | 6.5 | Laundry |
| | | | HEPES | | |
| GSM-B | 3 | 374 | Not buffered | 10.5 | Dish |

[0270] Laundry cleaning assays with HDL or HDD formulas were carried out at 25° C. for 15-30 min, while dish cleaning assay with GSM-B formula and PAS-38 swatches was carried out at 40° C. for 30 min. Following incubation, 100 uL of supernatant was transferred to a fresh MTP (Costar 9017) and absorbance was measured at 600 nm for EMPA-116 swatches, or at 405 nm for CFT CS-38, CFT CS-10, or PAS-38 swatches using a SpectraMax plate reader. Absorbance results were obtained by subtracting the value for a blank control (no enzyme) from each sample value to determine relative performance.

### Stability Assays

[0271] Variants were tested for stability under various stress conditions of buffers or detergents as indicated in Table 4 below by measuring the residual activity following incubation at elevated temperature. The elevated temperature was set to obtain approximately 30% residual activity of the stressed sample compared to the unstressed sample. Diluted enzyme sample was mixed in stressor and unstressed protease activity was measured. Diluted enzyme sample in stressor was incubated at elevated temperature and stressed protease activity was measured either by AAPF. DMC, or skim milk hydrolysis.

[0272] The stability assay conditions are described in Table 4 below. The commercial detergents except Persil Non-Bio and Blue Moon were heated to inactivate enzymes prior to use in stability assays:

TABLE 4
Conditions Used for Protease Stability Assays

| | Stress | | |
|---|---|---|---|
| | temp | | |
| Condition | (° C.) | Substrate | Type |
| 0.02% LAS, 2.1 mM EDTA in 50 mM | 53.5 | AAPF/DMC | Laundry |
| HEPES pH 8, 0.005% Tween | | | |
| 10% Kirkland Ultra | 56 | AAPF/DMC | Laundry |
| 10% OMO Klein & Krachtig | 51 | AAPF/DMC | Laundry |
| 10% Persil Non-Bio HDL | 60 | Skim milk | Laundry |
| 10% Test HDL | 60 | DMC | Laundry |
| 50 mM Tris pH 9; 1 mM EDTA; | 51 | AAPF/DMC | Dish |
| 0.005% Tween | | | |
| 50 mM Tris pH 9; 2 mM CaCl₂; | 72.5 | AAPF/DMC | Dish |
| 0.005% Tween | | | |

[0273] For the unstressed condition, enzyme was assayed immediately for activity on AAPF, DMC, or skim milk substrates (see above). For the stressed condition, the PCR plate was sealed and incubated at elevated temperature for 5 min using an Eppendorf 385 MasterCycler Pro Thermocycler, then assayed for activity. Stressed and unstressed activity was measured by either the hydrolysis of the synthetic substrate or by the DMC method, as described above. Percent (%) residual activities were calculated by calculating the ratio of the stressed over the unstressed activity and multiplying value by 100. Stability Pls were obtained by dividing the residual activity of a variant by that of the wild type.

### Aged Laundry Cleaning Assay

[0274] Each well of a 96 well MTP (Nunc 249946) was filled with a mini stir disc followed by addition of 270 uL 100% Persil Non-Bio detergent. 18.1 uL of enzyme supernatant diluted to −500 ppm was added to the detergent-filled plate and mixed using a magnetic tumbling mixing apparatus (V&P Scientific. VP710 series) for 5 min. For the initial time point (T=0). 25 uL of enzyme containing detergent was transferred to a MTP filled with 125 uL of buffer (5 mM HEPES, 250 ppm 3:1 Ca:Mg water hardness, pH 8). Five uL aliquots of enzyme diluted in detergent was then added to 185 uL buffer (5 mM HEPES, 250 ppm hardness, pH 8) previously added to a MTP containing an EMPA-116 BMI microswatch. At time point 0 (T=0), the cleaning assay was carried out in an analogous manner as described above for fresh cleaning. For the remaining time points, the detergent-enzyme plate was incubated at 55° C. for either: 1.5 h, 5 h, or 24 h; aliquots were removed at the end of each time point; and the cleaning assay carried out in an analogous manner as described above for fresh cleaning. A residual cleaning value was obtained by comparing the cleaning at the various remaining time points to the initial cleaning at T=0.

### Long Term Stability in Boron-free Laundry Detergent

[0275] A subset of LG12-clade variants were tested for stability over a span of two weeks in concentrated boron-free HDL detergents: Persil Non-Bio, Blue Moon, All 3X, and Purex Dirt Lift. A boron-free detergent is a detergent to which borate stabilizers have not been added. The amount of boron present in the boron-free detergents of this Example was quantified by elemental analysis, and in all instances, only trace amounts (less than 5 mg) of boron per kg of detergent were detected.

[0276] The long term stability experiments were carried out as follows. Purified enzyme was added at 1% w/w to commercially purchased detergent and mixed by gentle pipetting in either a plate or tube-based set up. An initial aliquot of enzyme detergent mixture was removed from each detergent and stored at −20° C. for use as a non-stressed reference. The remaining enzyme detergent samples were placed in a 37° C. incubator to induce stress. Aliquots of the enzyme detergent mixture were removed at various time points from the incubator over the course of the experiment and stored at −20° C. before measuring activity on AAPF substrate. The enzymatic activity of the detergent samples was measured by diluting then with 100 mM Tris pH 8.6, 0.005% Tween-80, 50 mM CaCl₂ buffer 70-150 fold and then assaying on the AAPF substrate as described above in the section on general set up for stability assays. The dilution factor for the detergent samples was adjusted to account for activity loss over the course of the study to remain within the standard curve of BPN′-Y217L subtilisin reference standard.

### EXAMPLE 2

### Generation of LG12-Clade Subtilisins

[0277] DNA manipulations to generate LG12-clade subtilisins were carried out via molecular biology techniques known in the art. An E. coli plasmid containing the genes of interest in its expression cassette and the chloramphenicol resistance marker from Staphylococcus aureus (CAT) was constructed. The expression cassette consisted of: B. subtilis aprE promoter, the B. subtilis aprE signal peptide sequence, the B. lentus protease pro-peptide, the region encoding the mature protease sequences for LG12-clade variants (SEQ ID NOs:1 and 3-8 for amino acid sequences) and a B. amyloliquefaciens terminator.

[0278] Gibson assembly was performed to assemble the integration cassette containing sequences that target the AprE locus. A suitable B. subtilis strain was transformed with reaction products and the transformed cells were plated on Luria's Agar+5 ppm chloramphenicol containing skim milk. Single colonies from the agar plates were picked into individual wells of a 96-well MTP that contained 150 uL of Luria's broth+5 ppm chloramphenicol in each well. The cultures were grown overnight at 37° C. while being shaken at 250 rpm. 75 uL of 50% glycerol (diluted in water) was added to each well and the MTPs (referred to as library stock plates) frozen at −80° C.

[0279] To produce the new proteases, the B. subtilis carrying each gene of interest was cultivated in an enriched semi-defined media for 2 days at 32° C. After centrifugation and filtration, culture supernatants with the novel subtilisins were used for assays and purification.

[0280] The mature LG2 wild-type (described as LG-12 SprC in Example 2, page 86, line 16 to page 87, line 14 of PCT Published Application WO2015/038792, filed Sep. 11, 2014, which is hereby incorporated herein by reference) amino acid sequence is set forth in, for example, FIG. 1A-1B as SEQ ID NO:10.

### EXAMPLE 3

### Evaluation of LG12-Clade Protease Variants in Laundry Detergents

### Laundry Cleaning Performance Assay

[0281] LG12-clade protease variants listed in Table 5 were tested for cleaning performance relative to BPN′-Y217L protease on BMI (EMPA-116) microswatches. The BPN′-Y217L protease is commercially available and is set forth as SEQ ID NO:48: AQSVPYGVSQIKAPALHSQGYTGSNVKV AVIDSGIDSSHPDLKVAGGASMVPSETNPFQDNNSHGTHVAGTVAALNNSIGVLGVAPSASLYA VKVLGADGSGQYSWIINGIEWAIANNMDVINMSLGGPSGSAALKAAVDKAVASGVVVVAAAG NEGTSGSSSTVGYPGKYPSVIAVGAVDSSNQRASFSSVGPELDVMAPGVSIQSTLPGNKYGALN GTSMASPHVAGAAALILSKHPNWTNTQVRSSLENTTTKLGDSFYYGKGLINVQAAAQKSFPEVV GKTVDQAREYFTLHYPQYDVYFLPEGSPVTLDLRYNRVKVFYNPGTNVVNHVPHVG.

TABLE 5
LG12-clade Protease Variants

| | | No. |
|---|---|---|
| Sample | | mutations |
| ID | Sequence Substitutions Relative to LG12 WT | vs LG12 |
| LG12- | A001T-N076D-T078S-T079I-Y086P-D089E- | 33 |
| CP022 | S097G-T103S-L104V-G106S-I111L-S114A- | |
| | I115G-S116N-N120H-I122A-M124L-G128S- | |
| | S129P-G131P-T133A-A134T-Q136E-C139V- | |
| | N141S-Y143T-N144S-I147V-V148L-I150V- | |
| | S158T-G166D-E248N | |
| LG12- | S052A-N076D-T078S-T079I-Y086P-D089E- | 34 |
| CP180 | S097G-T103S-L104V-G106S-I111L-S114A- | |
| | I115G-S116N-N120H-I122A-M124L-G128S- | |
| | S129P-G131P-T133V-A134T-Q136E-C139V- | |
| | N141S-Y143T-N144S-I147V-V148L-I150V- | |
| | S158T-G166D-F217L-E248N | |
| LG12- | A001T-N076D-T078S-T079I-Y086P-D089E- | 42 |
| CP446 | S097G-T103S-L104V-G106S-I111L-S114A- | |
| | I115G-S116N-N120H-I122A-M124L-G128S- | |
| | S129P-G131P-T133V-A134T-Q136E-C139V- | |
| | N141S-Y143T-N144S-I147V-V148L-I150V- | |
| | S158T-G166D-T209Y-N212S-N213T-S216T- | |
| | F217L-A224T-E248N-K251S-N252S-N256Y | |
| LG12- | N076D-T078S-T079I-Y086P-D089E-S097G- | 38 |
| CP455 | T103S-L104V-G106S-I111L-S114A-I115G- | |
| | S116N-N120H-I122A-M124L-G128S-S129P- | |
| | G131P-T133A-A134T-Q136E-C139V-N141S- | |
| | Y143T-N144S-I147V-V148L-I150V-S158T- | |
| | G166D-T209Y-N212S-N213T-S216T-F217L- | |
| | A224T-E248N | |
| LG12- | N076D-T078S-T079I-Y086P-N087S-A088V- | 35 |
| CP460 | D089S-S097G-T103S-L104V-G106S-I111L- | |
| | S114A-I115G-S116N-N120H-I122A-M124L- | |
| | G128S-S129P-G131P-T133A-A134T-Q136E- | |
| | C139V-N141S-Y143T-N144S-I147V-V148L- | |
| | I150V-S158T-G166D-F217L-E248N | |
| LG12- | A001T-N076D-T078S-T079I-Y086P-D089E- | 39 |
| CP462 | S097G-T103S-L104V-G106S-I111L-S114A- | |
| | I115G-S116N-N120H-I122A-M124L-G128S- | |
| | S129P-G131P-T133A-A134T-Q136E-C139V- | |
| | N141S-Y143T-N144S-I147V-V148L-I150V- | |
| | S158T-C166D-T209Y-N212S-N213T-S216T- | |
| | F217L-A224T-E248N | |
| LG12- | A001T-N076D-T078S-T079I-Y086P-N087S- | 40 |
| CP465 | A088V-D089S-S097G-T103S-L104V-G106S- | |
| | I111L-S114A-I115G-S116N-N120H-I122A- | |
| | M124L-G128S-S129P-G131P-T133A-A134T- | |
| | Q136E-C139V-N141S-Y143T-N144S-I147V- | |
| | V148L-I150V-S158T-G166D-T209Y-N212S- | |
| | N213T-S216T-F217L-E248N | |

[0282] The detergents used were commercially available Persil Non-Bio HDL (Unilever) at a final concentration of 2.7 g/L and Test HDL at a final concentration of 7.5 g/L. In both instances, the water hardness concentration was set at 250 ppm, using 5 mM sodium HEPES buffer to achieve pH 8.

[0283] Aliquots of purified enzyme were added to the detergent-filled microswatch plates to reach a final volume of 200 uL with a final enzyme concentration of 0.62 ppm. Assays were carried out at 25° C. for 30 min. Following incubation, 100 uL of supernatant was transferred to a fresh MTP (Costar 9017) and absorbance was read at 600 nm using the SpectraMax plate reader. Absorbance results were obtained by subtracting the value for a blank control (no enzyme) from each sample value. The cleaning PI for each assay condition was obtained by dividing the absorbance values for a given variant by that of the control (BPN′-Y217L).

[0284] Table 6 shows the results obtained when the cleaning and stability of various LG12-clade protease variants were compared to the benchmark BPN′-Y217L in non-boron containing detergents.

TABLE 6
Comparison of Cleaning and Stability of LG12-clade Protease
Variants to BPN′-Y217L in Non-boron Containing Detergents

| | Microswatch Cleaning | | Stability in 10% HDL, 60° C. | |
|---|---|---|---|---|
| | (PI vs BPN′-Y217L) | | (% Residual protease activity) | |
| | Persil Non- | | Persil Non- | |
| Variant | Bio HDL | Test HDL | Bio HDL | Test HDL |
| LG12-CP022 | 0.8 | 0.7 | 74.6 | 56.8 |
| LG12-CP180 | 0.9 | 0.7 | 69.2 | 44.0 |
| LG12-CP446 | 0.7 | 0.8 | 82.6 | 74.5 |
| LG12-CP455 | 0.9 | 0.8 | 81.2 | 66.4 |
| LG12-CP460 | 0.9 | 0.8 | 88.2 | 70.1 |
| LG12-CP462 | 0.9 | 0.8 | 86.0 | 64.2 |
| LG12-CP465 | 0.9 | 0.9 | 102.4 | 58.0 |
| BPN′-Y217L | 1.0 | 1.0 | 7.6 | 10.4 |

[0285] Table 6 data shows that following incubation in non-boron containing HDL detergents and heat stress, the variants: LG12-CP022, LG12-CP180, LG12-CP446, LG12-CP455, LG12-CP460, LG12-CP462, and LG12-CP465 all had significantly improved residual activity over BPN′-Y217L. These variants also retain a significant amount of cleaning efficiency while gaining on average 5-10 fold improvement in detergent stability.

### EXAMPLE 4

### Sequence Comparison of LG12-Clade Protease Variants and LG12 Wild-Type Protease

[0286] The sequences of the LG12-clade protease variants of Example 3 (i.e., LG12-CP022 (SEQ ID NO:1), LG12-CP180 (SEQ ID NO:3), LG12-CP446 (SEQ ID NO:4), LG12-CP455 (SEQ ID NO:5), LG12-CP460 (SEQ ID NO:6), LG2-CP462 (SEQ ID NO:7), and LG12-CP465 (SEQ ID NO:8)) were compared to the parent protease sequence of LG12 wild-type (SEQ ID NO:10). Clustal W sequence alignment, shown in FIG. 1, identifies regions of the amino acid sequence where changes occurred.

[0287] The LG12-CP022 (SEQ ID NO:1), LG12-CP180 (SEQ ID NO:3), LG12-CP446 (SEQ ID NO:4), LG12-CP455 (SEQ ID NO:5), LG12-CP460 (SEQ ID NO:6), LG12-CP462 (SEQ ID NO:7), and LG12-CP465 (SEQ ID NO:8) protease variants had superior stability and significant cleaning performance in laundry conditions. Most of these LG12-clade protease variants share 31 substitutions at the following positions: 76, 78, 79, 86, 97, 103, 104, 106, 111, 114, 115, 116, 120, 122, 124, 128, 129, 131, 134, 136, 139, 141, 143, 144, 147, 148, 150, 158, 166, 217 and 248, wherein the amino acid positions are numbered by correspondence with the linear LG12 wild-type (SEQ ID NO: 10) amino acid sequence numbering. Furthermore, one or more LG12-clade protease variants share one or more of the following substitutions: N76D, T78S. T79I. Y86P. S97G, T103S. L104V, G106S, I111L, S114A, I115G, S116N, N120H, I122A, M124L, G128S, S129P, G131P, A134T, Q136E, C139V, N141S, Y143T, N144S, I147V, V148L, I150V, S158T, G166D, F217L and E248N.

[0288] These sites are distributed primarily in three regions, two of which are structurally closely related. The overall protein fold observed on a crystallographic structure of LG12 wild-type protease is shown in FIG. 2.

[0289] FIG. 2 highlights key elements in the LG12 wild-type protease crystallographic model. The overall folding is represented as a schematic in light gray. The characteristic catalytic triad of the subtilisin proteases formed by Aspartic acid (D) 32, Histidine (H) 64 and Serine (S) 221 is shown as black stick figures. These 3 residues are found in a large canyon-like surface formed by segments comprising residues 97-104, 126-130, 150-170, and 207-220. The two calcium sites common to all commercial bacterial subtilisins are represented as dark gray spheres. The key loops forming the substrate binding region are highlighted as black lines and include residues 97-104, 126-130, 150-170 and 207-220. The 97-104 and 126-130 segments are followed by large helices comprising residues 105-117 and 131-145.

[0290] FIG. 3 provides a diagram of the 3D structure of the LG12 wild-type protease depicting (i) side chains of substitutions common to the best LG12-Clade protease variants, which substitutions are primarily localized in two segments that form the walls of the substrate binding site and the following helical segments that serve to anchor the segment in structure residues 97-148, (ii) positions 158, 166 and 217, which line the substrate binding cavity, and (iii) positions 76, 78, 79 and 86, which are near one of the critical calcium binding sites.

[0291] As can be seen in the image shown in FIG. 3, residues 97, 103, 104, 106, 111, 114, 115, 116, 120, 122, 124, 128, 129, 131, 134, 136, 139, 141, 143, 144, 147, 148, 150, and 158 are found either in the substrate binding region or in the helices following the highlighted segments. As a result, substitutions at these positions may contribute stabilizing inter-helical interactions and position these helices to act in concert with the substitutions in the substrate binding canyon to increase the overall stability and cleaning performance. Other beneficial mutations can be made at positions 76, 78, 79 and 86, which are localized near the tight calcium binding site common to all Bacillus subtilisins, as shown in FIG. 3. In addition, including mutations at position 158, 166 and 217 is shown to impart significant benefits.

### EXAMPLE 5

### Generation of Further LG12-Clade Protease Variants

[0292] Design of additional LG12-clade protease variants was performed using information from the site evaluation library screen that is described in PCT Published Application No. WO2015/038792, filed Sep. 11, 2014. From 2 to 23 beneficial mutations were introduced into the LG12 wild-type protease resulting in LG12-Clade protease variants with improved cleaning performance and stability.

[0293] A suitable B. subtilis host strain was transformed with expression plasmids containing the variants. The variants were grown in 96-well MTPs in cultivation medium (enriched semi-defined media based on MOPs buffer, with urea as major nitrogen source, glucose as the main carbon source, and supplemented with 1% soytone for robust cell growth) containing 25 ppm tetracycline in square enzyscreen plates for 2 days at 32° C., 300 rpm, with 80% humidity in shaking incubator.

### EXAMPLE 6

### Cleaning Performance and Stability of LG12-Clade Variant Proteases

[0294] Additional LG12-clade protease variants generated as described in Example 5 above were screened in MTP assays (as described in Example 1) to compare their cleaning performance and stability to parent molecule LG12 wild-type protease. All variants exhibited expression (HPLC assay) and proteolytic activity on DMC substrate on par with LG12 wild-type protease (SEQ ID NO:10). The variants were grouped according to improved properties. Table 7 sets forth the LG12-clade protease variants constructed and tested.

TABLE 7
LG12-clade Variant Proteases

| | | No. |
|---|---|---|
| Sample | | mutations |
| ID | Sequence Substitutions Relative to LG12 WT | vs. LG12 |
| LG12- | A001G-S024R-I030V-A048Q-S052Q-G053N- | 13 |
| 05502 | S114T-G128N-V149N-F217R-A228S-A236N- | |
| | S272K | |
| LG12- | A001G-S052N-L090P-N117S-V149G-S159E- | 8 |
| 05503 | Y238F-S272N | |
| LG12- | T003V-P009V-A019R-S024T-I030V-A040L- | 20 |
| 05505 | A057P-N076D-S101T-I107V-S116E-I147A- | |
| | S156A-G166Y-T185Q-S194P-A215E-S240F- | |
| | N256K-S272K | |
| LG12- | A001G-A048Q-S052T-T078G-Y091H-S114T- | 17 |
| 05517 | N117S-I147A-S156N-S159N-G166H-F217R- | |
| | M222L-A236N-Y238F-Q245N-V267N | |
| LG12- | A001G-K027T-N038Q-A040L-N043S-S052Q- | 18 |
| 05521 | G053D-G100K-G128N-R145N-V149N-S159D- | |
| | S181A-F217R-K251R-N256R-E271W-S272Q | |
| LG12- | A001G-P009T-A019R-N038A-A057P-V072A- | 20 |
| 05523 | N076D-S099L-T103E-S114T-R145W-V149S- | |
| | S156N-G166H-T185Q-S194P-F217R-Y238F- | |
| | K265S-S272K | |
| LG12- | N123D-S159D-T209F-M222L-V267N | 5 |
| 05524 | | |
| LG12- | A001G-P009I-A019R-S024T-K027T-I030V- | 20 |
| 05525 | N038Q-N043H-A048Q-G053D-S101T-I107T- | |
| | G128N-T133D-V149S-T185Q-A228S-T242S- | |
| | K251R-S272K | |
| LG12- | K045Q-N123D-S156N-T209F-N256P | 5 |
| 05526 | | |
| LG12- | A001G-A048Q-S052T-T078G-Y091H-S114T- | 16 |
| 05527 | N117S-I147A-S156N-S159N-G166H-M222L- | |
| | A236N-Y238F-Q245N-V267N | |
| LG12- | A001G-I030V-S052Q-G053N-S114T-G128N- | 11 |
| 05534 | V149N-S159N-F217R-A228S-A236N | |
| LG12- | A001G-A048Q-S052T-T078G-Y091H-S114T- | 17 |
| 05535 | N117S-I147A-S156N-S159N-G166H-M222L- | |
| | A236N-Y238F-Q245N-N256E-V267N | |
| LG12- | A001G-I030V-A040E-N043D-A048Q-S052Q- | 19 |
| 05536 | G053N-S114T-G128N-V149N-I150V-S156N- | |
| | S159D-G166N-S181A-S216T-M222L-A228S- | |
| | A236N | |
| LG12- | A001G-T003E-A040D-A048Q-S052T-G053E- | 23 |
| 05537 | T078G-Y091H-S114T-N117S-I147A-S156N- | |
| | S159D-G166H-S182E-A215D-F217R-M222L- | |
| | A236N-Y238F-Q245N-N256E-V267N | |
| LG12- | A001G-S024R-I030V-A048Q-S052Q-G053N- | 14 |
| 05540 | S114T-G128N-V149N-S159D-F217R-A228S- | |
| | A236N-S272K | |
| LG12- | A001G-K027S-N038T-G053E-T078D-L090P- | 13 |
| 05541 | V093T-T103E-S159D-G166S-T185Q-F217R- | |
| | A236N | |
| LG12- | A001G-K027T-A040L-N043S-S052Q-G053D- | 15 |
| 05542 | V149N-S159D-G166Y-S181A-F217R-M222L- | |
| | N256R-E271W-S272Q | |
| LG12- | T003V-N043L-G053E-A057P-V072A-N076D- | 19 |
| 05543 | S101T-I107T-S116E-I147A-S159Q-G166A- | |
| | S188Y-S194P-F217R-A236Q-S240F-1246V- | |
| | S272Q | |
| LG12- | A001G-T003E-A040D-A048E-S052T-G053E- | 22 |
| 05546 | T078G-Y091H-S114T-N117S-I147A-S156N- | |
| | S159D-G166H-S182E-A215D-M222L-A236N- | |
| | Y238F-Q245N-N256E-V267N | |
| LG12- | A001G-K027T-N038Q-A040L-N043S-S052Q- | 19 |
| 05552 | G053D-N117E-R145N-V149N-S159D-G166Y- | |
| | S181A-F217R-M222L-K251R-N256R-E271W- | |
| | S272Q | |
| LG12- | A001G-A040D-S052T-T078G-Y091H-S114T- | 17 |
| 05553 | N117S-I147A-S156N-S159N-G166H-S182E- | |
| | M222L-A236N-Y238F-Q245N-V267N | |
| LG12- | A001G-A048Q-S052Q-G053N-S114T-G128N- | 9 |
| 05557 | S159N-S216T-A228S | |
| LG12- | A001G-P009T-S024T-K027S-A057P-V072A- | 20 |
| 05559 | N076D-S101T-S116E-N140Y-V149N-S159N- | |
| | G166N-T185Q-S188Y-S194P-1234V-S240F- | |
| | K251R-E271F | |
| LG12- | A001G-I030V-N043D-A048Q-S052Q-G053N- | 13 |
| 05561 | S114T-G128N-V149N-S159N-S216T-A228S- | |
| | A236N | |
| LG12- | A001G-I030V-A040V-N076D-T078D-T103E- | 9 |
| 05563 | G166S-T185Q-F217R | |
| LG12- | A001G-K027S-A040V-G053N-T078D-L090P- | 11 |
| 05565 | T103E-S156N-S159D-G166S-F217R | |
| LG12- | N038Q-G100A-N117S-I147A-S158T-G166D- | 8 |
| 05566 | N256P-S272K | |
| LG12- | A001G-I030V-A048Q-S0520-G053N-S114T- | 16 |
| 05567 | G128N-V149N-I150V-S156N-S159N-S181A- | |
| | S216T-M222L-A228S-A236N | |
| LG12- | N038Q-G100A-N117S-I147A-S158T-N256P- | 7 |
| 05569 | S272K | |
| LG12- | A001G-I030V-N043D-A048E-S052Q-G053N- | 13 |
| 05571 | S114T-G128N-V149N-S159D-S216T-A228S- | |
| | A236N | |
| LG12- | A001G-K027T-N038Q-A040L-N043S-S052Q- | 18 |
| 05576 | G053D-N117E-R145N-V149N-S159D-G166Y- | |
| | S181A-F217R-M222L-K251R-N256R-E271W | |
| LG12- | S024R-1030V-A040E-N043D-A048E-S052Q- | 21 |
| Q5577 | G053N-S114T-G128N-V149N-I150V-S156N- | |
| | S159D-G166D-S181A-S216T-F217R-A228S- | |
| | A236N-E271W-S272K | |
| LG12- | N076D-G118R-G128A-S129M-S130T-G166D- | 7 |
| 05626 | E248N | |
| LG12- | N076D-G118R-G128D-S129E-S130L-G166D- | 7 |
| 05652 | E248N | |
| LG12- | N076D-G118R-G128D-S129K-S130H-G166D- | 7 |
| 05657 | E248N | |
| LG12- | N076D-G118R-G128D-S129M-S130H-G166D- | 7 |
| 05659 | E248N | |
| LG12- | N076D-G118R-G128D-S129N-S130M-G166D- | 7 |
| 05661 | E248N | |
| LG12- | N076D-G118R-G128D-S129N-S130Y-G166D- | 7 |
| 05662 | E248N | |
| LG12- | N076D-G118R-G128D-S129R-S130I-G166D- | 7 |
| 05668 | E248N | |
| LG12- | N076D-G118R-G128D-S129R-S130T-G166D- | 7 |
| 05670 | E248N | |
| LG12- | N076D-G118R-G128D-S130N-G166D-E248N- | 7 |
| 05671 | G160D | |
| LG12- | N076D-G118R-G128D-S129T-S130F-G166D- | 7 |
| 05672 | E248N | |
| LG12- | N076D-G118R-G128D-S129Y-S130R-G166D- | 7 |
| 05673 | E248N | |
| LG12- | N076D-G118R-G128E-S129G-S130Y-G166D- | 7 |
| 05680 | E248N | |
| LG12- | N076D-G118R-G128E-S129H-S130T-G166D- | 7 |
| 05681 | E248N | |
| LG12- | N076D-G118R-G128E-S129V-S130M-G166D- | 7 |
| 05687 | E248N | |
| LG12- | N076D-G118R-S129D-S130A-G166D-E248N | 6 |
| 05707 | | |
| LG12- | N076D-G118R-S129T-S130A-G166D-E248N | 6 |
| 05710 | | |
| LG12- | N076D-G118R-S129V-S130Q-G166D-E248N- | 7 |
| 05720 | Q275R | |
| LG12- | N076D-G118R-G128H-S129L-S130L-G166D- | 7 |
| 05731 | E248N | |
| LG12- | N076D-G118R-G128K-S129I-S130N-G166D- | 7 |
| 05781 | E248N | |
| LG12- | N076D-G118R-G128N-S129G-S130N-G166D- | 7 |
| 05829 | E248N | |
| LG12- | N076D-G118R-G128N-S129M-S130G-G166D- | 7 |
| 05831 | E248N | |
| LG12- | N076D-G118R-G128N-S129N-S130H-G166D- | 7 |
| 05832 | E248N | |
| LG12- | N076D-G118R-G128N-S129T-S130Q-G166D- | 7 |
| 05837 | E248N | |
| LG12- | N076D-G118R-G128N-S129V-S130V-G166D- | 7 |
| 05838 | E248N | |
| LG12- | N076D-G118R-G128N-S129Y-S130M-G166D- | 7 |
| 05839 | E248N | |
| LG12- | N076D-G118R-G128Q-S129M-S130H-G166D- | 7 |
| 05863 | E248N | |
| LG12- | N076D-G118R-G128S-S129E-S130W-G166D- | 7 |
| 05896 | E248N | |
| LG12- | N076D-G118R-G128S-S129H-S130Q-G166D- | 7 |
| 05899 | E248N | |
| LG12- | N076D-G118R-G128S-S129I-S130R-G166D- | 7 |
| 05901 | E248N | |
| LG12- | N076D-G118R-G128S-S129L-S130E-G166D- | 7 |
| 05902 | E248N | |
| LG12- | N076D-G118R-G128S-S129L-S130M-G166D- | 7 |
| 05904 | E248N | |
| LG12- | N076D-G118R-G128S-S129N-S130V-G166D- | 7 |
| 05908 | E248N | |
| LG12- | N076D-G118R-G128S-S129Q-G166D-E248N | 6 |
| 05911 | | |
| LG12- | N076D-G118R-G128S-S129V-S130L-G166D- | 7 |
| 05912 | E248N | |
| LG12- | N076D-G118R-G128Y-S129G-S130T-G166D- | 7 |
| 06006 | E248N | |
| LG12- | G118R-G128M-S129L-S130Q-G166D-E248N | 6 |
| 06029 | | |
| LG12- | G166H-S159D | 2 |
| 06520 | | |
| LG12- | N038T-N140D-G166Y-T185Q-S159D | 5 |
| 06556 | | |
| LG12- | N038T-S156H-G166Y-T185Q-S272Q-S159D | 6 |
| 06575 | | |
| LG12- | N038T-S156H-G166Y-S272Q-S159D | 5 |
| 06582 | | |
| LG12- | N140D-V149L-S156H-G166N-S272Q | 5 |
| 06593 | | |
| LG12- | N140D-V149L-G166Y-T185Q-S159D | 5 |
| 06596 | | |
| LG12- | N038T-N140D-V149L-S156H-G166Y-T185Q- | 8 |
| 06608 | S272Q-S159D | |
| LG12- | N140D-G166Y-T185Q-S159D | 4 |
| 06612 | | |
| LG12- | A040A-V149V-S156N-G166A-S181S-S182E- | 8 |
| 06801 | S194S-N256N | |
| LG12- | G053D-N076D-G166D-S272K | 4 |
| 06924 | | |
| LG12- | G053D-N076D-G118G-G166D-E248E-N256N- | 7 |
| 06925 | S272S | |
| LG12- | G053D-N076D-G166D-N256R-S272K | 5 |
| 06929 | | |
| LG12- | G053D-G166D-S272K | 3 |
| 06948 | | |
| LG12- | G053D-G166D | 2 |
| 06949 | | |
| LG12- | G053D-G118R-G166D | 3 |
| 06954 | | |
| LG12- | N076D-G166D-S272K | 3 |
| 06960 | | |
| LG12- | N076D-G166D-N256R | 3 |
| 06961 | | |
| LG12- | N076D-G166D-E248K | 3 |
| 06964 | | |
| LG12- | N076D-G118R-G166D | 3 |
| 06969 | | |
| LG12- | G166D-S272K | 2 |
| 06978 | | |
| LG12- | G118R-G166D-N256R-S272K | 4 |
| 06992 | | |
| LG12- | G053D-G118R-G166D-S272K | 4 |
| 07003 | | |
| LG12- | G053D-G118R-G166D-N256R-S272K | 5 |
| 07004 | | |
| LG12- | G053D-N076D-G166D-E248K-S272K | 5 |
| 07016 | | |
| LG12- | N076D-G166D | 2 |
| 07024 | | |
| LG12- | N076D-G118R-G166D-N256R-S272K | 5 |
| 07027 | | |
| LG12- | K027S-G053E-S159D-N256P | 4 |
| 07133 | | |
| LG12- | K045Q-G053E-S159D-N256P | 4 |
| 07143 | | |
| LG12- | P009T-K045R-A048E-T078A-G128N-N140D- | 13 |
| 07158 | S158V-S181N-S194P-T209V-Q245A-N256P- | |
| | S272Q | |

[0295] A set of LG2-clade protease variants with improved stability in 10% OMO HDL detergent over LG12 wild-type protease parent molecule had a PI>1.01 for stability in LAS/EDTA and 10% OMO HDL detergent, and a PI>0.75 for stability in 10% Kirkland HDL detergent. These LG12-clade variants are: LG12-07133, LG12-05524, LG12-05526, LG12-05575, LG12-05569, LG12-05503, LG12-05566. LG12-07075, LG12-05557, LG12-05563, LG12-05534, LG12-05565, LG12-05502, LG12-05541, LG12-05561, LG12-05571, LG12-07158, LG12-05540, LG12-05542, LG12-05527, LG12-05567, LG12-05517, LG12-05535, LG12-05553, LG12-05521, LG12-05576, LG12-05536, LG12-05543, LG12-05552, LG12-05505, LG12-05523, LG12-05525, LG2-05559, LG12-05577, LG12-05546, and LG12-05537.

[0296] A set of LG12-clade protease variants with improved laundry cleaning in HDD detergent over LG12 wild-type protease parent molecule had a PI>1.01 in Kirkland Ultra HDD detergent. OMO color HDD detergent, and in Surf Excel HDD for those variants marked with an asterisk (*). These LG12-clade variants are: LG12-05526*, LG2-05569*, LG12-05626, LG12-05652, LG12-05657, LG12-05659. LG12-05661, LG12-05662, LG12-05668, LG12-05670, LG12-05672, LG12-05673, LG12-05680, LG12-05681, LG12-05687, LG12-05707, LG12-05710, LG12-05731LG12-05781LG12-05829, LG12-05831, LG12-05832, LG12-05837, LG12-05838, LG12-05839, LG12-05863, LG12-05896, LG12-05899, LG12-05901, LG12-05902, LG12-05904, LG12-05908, LG12-05911, LG12-05912, LG12-06006, LG12-06029, LG12-06924, LG12-06929, LG12-06948, LG12-06949, LG12-06954, LG12-06960, LG12-06961, LG12-06964, LG12-06969, LG12-06978, LG12-06992, LG12-07003, LG12-07004, LG12-07016, LG12-07024, LG12-07027, LG12-05566*, LG12-05671, LG1205720, LG12-06593, LG12-07110*, LG12-05522*, LG12-06520, LG12-06556, LG12-06575, LG12-06582, LG12-06596, LG12-06608, LG12-06612, and LG12-05540*.

[0297] A set of LG12-clade protease variants with improved stability and laundry cleaning across all assays over LG12 wild-type protease parent molecule had a PI value >1.01 in all laundry detergents, including Blue Moon HDL. These LG12-clade variants are: LG12-05566, LG12-07065, LG12-07110, LG12-05522, and LG12-05540.

[0298] A set of LG12-clade protease variants with improved ADW cleaning over LG12 wild-type protease parent molecule had a PI value >1.01 in GSM-B detergent. These LG2-clade variants are: LG12-05520, LG12-05566, LG12-05569, LG12-05626, LG12-05652, LG12-05657, LG12-05659, LG12-05661, LG12-05662, LG12-05668, LG12-05670, LG12-05671, LG12-05672, LG12-05673, LG12-05680, LG12-05681, LG12-05687, LG12-05707, LG12-05710, LG12-05720, LG12-05731, LG12-05781, LG12-05829 LG12-05831, LG12-05832, LG12-05837, LG12-05838, LG12-05839, LG12-05863, LG12-05896, LG12-05899, LG12-05901, LG12-05902, LG12-05904, LG12-05908, LG12-05911, LG12-05912, LG12-06006, LG12-06029, LG12-06924, LG12-06925, LG12-06929, LG12-06943, LG12-06948, LG12-06949, LG12-06954, LG12-06960, LG12-06961, LG12-06964, LG12-06969, LG12-06978, LG12-06992, LG12-07003, LG12-07004, LG12-07016, LG12-07024, LG12-07027, LG12-07051, LG12-07058, LG12-07098, LG12-07110, LG12-07115, LG12-07118, LG12-07143, LG12-07144, LG12-07158, LG12-07166, and LG12-07194.

[0299] A set of LG2-clade protease variants with improved stability and ADW cleaning over LG12-clade wild-type protease parent molecule had a stability PI>1.2 in buffer (50 mM Tris pH9-2 mM CaCl₂ and Tris pH9-1 mM EDTA as described in Table 4) and an ADW cleaning PI>1.0. These LG12-clade variants are: LG12-05566, LG12-05569, LG12-05657, LG12-05668, LG12-05670, LG12-06006, LG12-06029, LG12-06929, LG12-06948, LG12-06949, LG12-06954, LG12-06960, LG12-06961, LG12-06978, LG12-06992, LG12-07003, LG12-07004, LG12-07027, LG12-07143, LG12-07158, LG12-07051, LG12-07058, LG12-07098, LG12-07110, LG12-07115, LG12-07118, and LG12-07166.

[0300] Substitutions that occurred frequently in the above improved LG2-clade protease variants include: S052, G053, G118, S129, S130, V149, S156, S159, G166, E248, N256 and S272, which can be observed in further combination with mutations N076D and/or F217R.

### EXAMPLE 7

### Further Evaluation of LG12-Clade Variants

[0301] Additional LG12-clade protease variants listed in Table 8 were synthesized and expressed in B. subtilis as described in Example 2.

TABLE 8
LG12-clade Variants Purified for Further Analysis

| | | No. |
|---|---|---|
| Sample | | mutations |
| ID | Sequence Substitutions Relative to LG12 WT | vs LG12 |
| LG12- | G053D-N076D-G166D | 3 |
| 05520 | | |
| LG12- | N038Q-G053E-G100A-N117S-I147A-S158T- | 9 |
| 05522 | G166D-N256P-S272K | |
| LG12- | A001G-1030V-T078D-V093T-T103E-S156N- | 11 |
| 05547 | S159D-G166S-S194P-F217R-A236N | |
| LG12- | S024T-G053E-G166D-M222L-N256P | 5 |
| 05575 | | |
| LG12- | V149L-S156H-T185Q-S272Q-S159D | 5 |
| 06491 | | |
| LG12- | G053D-N076D-G118R-G166D-N256R | 5 |
| 06943 | | |
| LG12- | N038Q-G053E-G100A-N117S-I147A-S158T- | 8 |
| 07051 | G166D-S272K | |
| LG12- | S052T-V149G-S156N-G166H-F217R | 5 |
| 07058 | | |
| LG12- | A001G-S052Q-V149G-S156N-S159N-S182E- | 8 |
| 07065 | Y238F-S272Q | |
| LG12- | A001G-S052Q-S114T-S156N-S159N-S182E- | 8 |
| 07075 | Y238F-S272Q | |
| LG12- | S052T-V149G-S156N-S159D-G166D-F217R | 6 |
| 07098 | | |
| LG12- | N038Q-G053E-N117S-I147A-S158T-G166D- | 8 |
| 07110 | N256P-S272K | |
| LG12- | A040D-S114T-I147A-S159N-G166D-S182E | 6 |
| 07115 | | |
| LG12- | S052T-V149G-S156N-G166D-S182E-F217R | 6 |
| 07118 | | |
| LG12- | S052T-V149G-S156N-G166D-F217R | 5 |
| 07166 | | |

[0302] For laundry cleaning assays, aliquots of purified enzyme were added to a detergent-filled microswatch plate to reach a final volume of 200 uL for laundry assays with a final enzyme concentration between 5-0.5 ppm and tested as described in Example 1. Samples of LG112 wild-type parent protease and BPN′-Y217L benchmark protease were also evaluated. The microswatch cleaning for purified LG12-clade protease variants in BMI laundry assays is set forth in Table 9A. PIs were calculated versus LG12 wild-type parent protease.

TABLE 9A
Comparison of Cleaning Performance of Various LG12-
clade Protease Variants in HDD and HDL Laundry Detergents
to LG12 WT and BPN′-Y217L, Reported as PI

| | Kirkland | OMO | Surf | OMO | Kirkland | Blue Moon |
|---|---|---|---|---|---|---|
| Sample ID | HDD | HDD | Excel | HDL | HDL | HDL |
| LG12 WT | 1.0 | 1.0 | 1.0 | 1.0 | 1.0 | 1.0 |
| LG12-05520 | 1.1 | 0.9 | 1.0 | 1.4 | 1.1 | 5.4 |
| LG12-05547 | 0.7 | 0.4 | 0.5 | 1.0 | 0.7 | 3.3 |
| LG12-06491 | 1.6 | 1.4 | 1.1 | 1.9 | 1.7 | 2.4 |
| LG12-06943 | 2.5 | 1.6 | 1.8 | 1.8 | 2.2 | 3.7 |
| LG12-07051 | 2.2 | 0.6 | 0.9 | 2.5 | 2.2 | 4.8 |
| LG12-07058 | 1.2 | 1.1 | 0.9 | 0.9 | 1.0 | 1.0 |
| LG12-07098 | 1.6 | 0.7 | 0.9 | 1.2 | 1.1 | 2.8 |
| LG12-07115 | 1.0 | 0.8 | 0.9 | 1.0 | 1.0 | 4.1 |
| LG12-07118 | 1.3 | 0.8 | 0.8 | 1.1 | 0.9 | 2.5 |
| LG12-07166 | 1.7 | 1.3 | 1.1 | 1.6 | 1.5 | 1.7 |
| BPN′-Y217L | 0.5 | 0.1 | 0.2 | 1.25 | 1.4 | 1.45 |

[0303] The stability of several purified LG12-clade protease variants was measured as described in Example 1, Table 4, in LAS/EDTA and 10% HDL (Kirkland and OMO) and compared to LG12 wild-type parent protease and BPN′-Y217L benchmark protease. The results are shown in Table 9B below.

TABLE 9B
Comparison of Stability of Various LG12-clade Protease
Variants in 10% HDL Laundry Detergents and in LAS/EDTA
to LG12 WT and BPN′-Y217L, Reported as PI

| Sample ID | LAS/EDTA | 10% OMO HDL | 10% Kirkland HDL |
|---|---|---|---|
| LG12 WT | 1.0 | 1.0 | 1.0 |
| LG12-05520 | 1.7 | 1.4 | 1.0 |
| LG12-05547 | 2.2 | 1.4 | 1.2 |
| LG12-06491 | 4.1 | 3.0 | 2.3 |
| LG12-06943 | 2.1 | 2.7 | 2.6 |
| LG12-07051 | 4.1 | 3.4 | 3.2 |
| LG12-07058 | 2.1 | 2.7 | 2.6 |
| LG12-07098 | 2.0 | 1.2 | 1.1 |
| LG12-07115 | 1.8 | 1.2 | 1.0 |
| LG12-07118 | 1.9 | 1.2 | 1.0 |
| LG12-07166 | 2.8 | 2.8 | 1.8 |
| BPN′-Y217L | 3.6 | 3.0 | 0.3 |

[0304] For ADW cleaning assays, aliquots of clarified culture supernatants were added to GSM-B detergent-filled microswatch (PAS-38) plate and tested as described in Example 1. The stability of these molecules was also tested in 50 mM Tris pH9-2 mM CaCl₂ and Tris pH9-1 mM EDTA, as described in Example 1. Results for ADW cleaning and stability are shown in Table 9C below.

TABLE 9C
Comparison of ADW Cleaning Performance of Various
LG12-clade Protease Variants vs LG12 WT in GSM-B
Detergent and Stability Assays, Reported as PI

| | ADW | | |
|---|---|---|---|
| Sample ID | Cleaning | Stability TRIS-CA | Stability TRIS-EDTA |
| LG12 WT | 1.0 | 1.0 | 1.0 |
| LG12-05668 | 2.2 | 2.2 | 1.9 |
| LG12-07051 | 1.1 | 2.1 | 2.1 |
| LG12-07058 | 1.3 | 1.6 | 2.3 |
| LG12-07098 | 1.5 | 1.7 | 2.2 |
| LG12-07110 | 1.6 | 2.0 | 2.1 |
| LG12-07115 | 1.3 | 1.7 | 2.0 |
| LG12-07118 | 1.5 | 1.8 | 2.6 |
| LG12-07166 | 1.6 | 2.0 | 2.6 |

[0305] The stability of several LG12-clade protease variants was also measured under long-term accelerated stability conditions in various boron-free detergents, and compared to LG12 wild-type parent protease and BPN′-Y217L benchmark protease. The results are shown in Table 10. These detergents represent a cross-section of geographies and formulations, and results indicate that stability improvements can be made for all the formulations examined.

[0306] The long term stability experiments were carried out as follows. Purified enzyme was added at 1% w/w to commercially purchased detergent and mixed by gentle pipetting in either a plate or tube-based set up. An initial aliquot of enzyme detergent mixture was removed from each detergent and stored at −20° C. for use as a non-stressed reference. The remaining enzyme detergent samples were placed in a 37° C. incubator to induce stress. Aliquots of the enzyme detergent mixture were removed at various time points from the incubator over the course of the experiment and stored at −20° C. before measuring activity on AAPF. The enzymatic activity of the detergent samples was measured by diluting with 100 mM Tris pH 8.6, 0.005% Tween-80, 50 mM CaCl₂ buffer 70-150 fold before assaying on the AAPF substrate as described above in Example 1. The dilution factor for the detergent samples was adjusted to account for activity loss over the course of the study to remain within the standard curve of BPN′-Y217L.

[0307] The activity at each time point for a particular variant was measured and the residual activity was calculated by comparison to the initial unstressed activity for that variant (T=0). The loss in activity was fit to a one phase decay curve and the T₅₀ (half-life) parameter was extracted. The T₅₀ of each variant was compared to that of BPN′-Y217L to calculate the long term stability PI set forth in Table 10.

TABLE 10
Long term Stability of LG12-clade Protease Variants
in Various Boron-free Detergents vs BPN′-
Y217L Protease Benchmark, Reported as PI

| Sample ID | Persil Non-Bio | All 3X | Purex Dirt Lift | Blue Moon |
|---|---|---|---|---|
| LG12 WT | 0.7 | 0.8 | 1.7 | 0.7 |
| LG12-05520 | 0.5 | 1.2 | 1.7 | NA* |
| LG12-06491 | 0.5 | 0.4 | 0.9 | 1.4 |
| LG12-06943 | 0.6 | 1 | 8.7 | 16 |
| LG12-07051 | 0.6 | 1.3 | 6.7 | NA* |
| LG12-07058 | 0.7 | 1.8 | 12.7 | 0.70 |
| LG12-07166 | 1.03 | 1.5 | 2.0 | 5.3 |
| BPN′-Y217L | 1.0 | 1.0 | 1.0 | 1.0 |

*NA denotes Not Analyzed

### EXAMPLE 8

### Laundry Cleaning in Boron-Free Detergents

[0308] Several highly stable variants from the long term stability experiment were tested for cleaning in boron-free formulations as shown in Table 11, where PI values are reported versus LG12 wild-type protease parent.

[0309] The detergents used were the same as those used in the long term stability experiment (see above) and included Persil Non-Bio (Unilever), Blue Moon (Blue Moon). All 3X (Sun), and Purex Dirt Lift (Henkel). Superior cleaning was seen for LG12-06943 relative to LG12 wild-type in the two North American formulations (Purex and All 3X), the European formulation (Persil Non-Bio), and the Chinese formulation (Blue Moon).

TABLE 11
Cleaning of Select LG12-clade Protease Variants with Improved
Performance vs LG12 WT in Boron-free Detergents, Reported as PI

| Sample ID | All 3X | Purex Dirt Lift | Persil Non-Bio | Blue Moon |
|---|---|---|---|---|
| LG12 WT | 1.0 | 1.0 | 1.0 | 1.0 |
| LG12-06943 | 1.8 | 1.6 | 1.5 | 1.3 |
| LG12-07051 | 1.5 | 2.0 | 2.0 | 1.4 |
| LG12-07166 | 0.7 | 1.2 | 1.2 | 1.0 |

### EXAMPLE 9

### Evaluation of Amino Acid Deletions in the Region of Residues 53 to 58 of LG12 Wild-Type Protease

[0310] One or more deletions at positions 53, 55, 56, 57, and/or 58 were made in the LG12 wild-type backbone. These variants were tested using the methods described in Example 1. Results for cleaning performance across multiple assays are reported in Table 12 as compared to the LG12 wild-type parent protease.

TABLE 12
Relative Performance of various LG12 variants

| | Sample ID | | | | | |
|---|---|---|---|---|---|---|
| | LG12 | LG12- | LG12- | LG12- | LG12- | LG12- |
| | WT | 07164 | 07174 | 07184 | 07194 | 07144 |
| Description | parent | del053 | del055 | del057 | del058 | del056- |
| | | | | | | 058 |
| Expression | ++++ | +++ | ++++ | ++++ | ++++ | ++++ |
| AAPF Activity | ++++ | +++++ | ++++ | +++ | +++ | ++++ |
| DMC Activity | ++++ | ++++ | ++++ | +++ | +++ | ++++ |
| Kirkland | ++++ | +++++ | +++++ | ++++ | ++++ | ++++ |
| HDD BMI | | | | | | |
| OMO HDD | ++++ | +++++ | +++++ | +++ | +++ | +++ |
| BMI | | | | | | |
| Kirkland | ++++ | +++++ | +++++ | +++ | +++ | ++++ |
| HDL BMI | | | | | | |
| OMO HDL | ++++ | NA* | +++ | +++ | ++ | ++ |
| BMI | | | | | | |
| Blue Moon | ++++ | +++++ | +++++ | ++++ | +++++ | ++++ |
| HDL BMI | | | | | | |
| ADW PAS-38 | ++++ | ++ | +++ | +++ | ++++ | ++++ |

*Not analyzed

[0311] This data suggests that modifications to decrease the size of the 55 to 59 loop formed by these residues in the LG12 structure can be accommodated and may in some cases impart improved cleaning performance.

### EXAMPLE 10

### Sequence Comparison of LG12-Clade Protease Variants

[0312] Alignment of Select LG12 Variants with Other Subtilisins

[0313] The amino acid sequences of LG12 wild-type (SEQ ID NO: 10), LG12-05520 (SEQ ID NO:37), LG12-05522 (SEQ ID NO:38), LG12-05547 (SEQ ID NO:29), LG12-05575 (SEQ ID NO:41), LG12-06491 (SEQ ID NO:34), LG12-06943 (SEQ ID NO:42), LG12-07051 (SEQ ID NO:39), LG12-07058 (SEQ ID NO:30), LG12-07065 (SEQ ID NO:35), LG12-07075 (SEQ ID NO:36), LG12-07098 (SEQ ID NO:31), LG12-07110 (SEQ ID NO:40), LG12-07115 (SEQ ID NO:43), LG12-07118 (SEQ ID NO:33), and LG12-07166 (SEQ ID NO:32) were aligned with sequences of previously identified LG12-clade members: Bhon03321 (SEQ ID NO:18), DSM_9712 (SEQ ID NO:19), DSM_9711 (SEQ ID NO:45), and DSM_6951 (SEQ ID NO:46). The alignment also included sequences of the following additional subtilisin proteases: B. amyloliquefaciens CAA24990 (SEQ ID NO:21), B_lentus_P29600 (SEQ ID NO:22). AprL (SEQ ID NO:23), Bag00927 (SEQ ID NO:25). Bgi02446 (SEQ ID NO:24), BspAL03279 (SEQ ID NO:27), BspMO4033 (SEQ ID NO:26), and BspM04284 (SEQ ID NO:28) using CLUSTALW software (Thompson et al., Nucleic Acids Research. 22:4673-4680, 1994) with the default parameters. The alignment was performed using the following parameters: Kimura's correction for sequence distance and ignoring positions with gaps. The NJ method works on a matrix of distances between all pairs of sequences to be analyzed. These distances are related to the degree of divergence between the sequences. FIG. 4 shows the alignment of these protease sequences. The position of the 4 amino acid delete that is observed in LG12 SprC when compared to B. lentus (P29600) sequence, located at positions encompassing G160DEL-N161DEL-R162DEL-N163DEL, was manually adjusted on this alignment to match details from the crystal structures.

### EXAMPLE 11

### Phylogenetic Tree for LG12-Clade Protease Variants and Other Subtilisins

[0314] A phylogenetic tree for amino acid sequences of LG12 (SEQ ID NO:10), LG12-05520 (SEQ ID NO:37), LG12-05522 (SEQ ID NO:38), LG12-05547 (SEQ ID NO:29), LG12-05575 (SEQ ID NO:41), LG12-06491 (SEQ ID NO:34), LG12-06943 (SEQ ID NO:42), LG12-07051 (SEQ ID NO:39). LG12-07058 (SEQ ID NO:30), LG12-07065 (SEQ ID NO:35), LG12-07075 (SEQ ID NO:36), LG12-07098 (SEQ ID NO:31), LG12-07110 (SEQ ID NO:40), LG12-07115 (SEQ ID NO:43), LG12-07118 (SEQ ID NO:33), LG12-07166 (SEQ ID NO:32), LG12-CP022 (SEQ ID NO:1), LG12-CP180 (SEQ ID NO:3), LG12-CP446 (SEQ ID NO:4), LG12-CP455 (SEQ ID NO:5), LG12-CP460 (SEQ ID NO:6). LG12-CP462 (SEQ ID NO:7), and LG12-CP465 (SEQ ID NO:8) was built using sequences of previously identified LG12-clade members: Bhon03321 (SEQ ID NO: 18), DSM_9712 (SEQ ID NO: 19, DSM_9711 (SEQ ID NO:45), DSM_6951 (SEQ ID NO:46), and sequences of additional subtilisin proteases: B. amyloliquefaciens_CAA24990 (SEQ ID NO:21), B_lentus_P29600 (SEQ ID NO:22), AprL (SEQ ID NO:23), Bag00927 (SEQ ID NO:25), Bgi02446 (SEQ ID NO:24). BspAL03279 (SEQ ID NO:27), BspMO4033 (SEQ ID NO:26), and BspM04284 (SEQ ID NO:28). The sequences were entered in the Vector NTI Advance suite and a Guide Tree was created using the Neighbor Joining (NJ) method (Saitou and Nei, Mol Biol Evol. 4:406-425, 1987). The tree construction was calculated using the following parameters: Kimura's correction for sequence distance and ignoring positions with gaps. The phylogenetic tree shown in FIG. 5 was visualized using Geneious 8.1 (Biomatters Ltd.). The branch length is a measure of the amount of divergence between two nodes in the tree and is expressed in units of substitutions per site of the sequence alignment.

### EXAMPLE 12

### Sequence Motif and Structural Relationship of the LG12-clade Proteases

[0315] The LG12-clade motif EPNALQDGNGHGTH includes the penta residue segment proline, asparagine, alanine, leucine, and glutamine at positions 54-59, which is a segment leading into the Histidine 64 of the catalytic triad. The relative juxtaposition of this segment with respect to the catalytic triad in the crystallographic model of LG12 is shown in FIG. 6. FIG. 6 shows a schematic of the overall fold of the main chain from the crystallographic model of LG12 wild-type protease in light gray. The side chains of the catalytic triad formed by Aspartic acid 32, Histidine 64 and Serine 221 are shown as black stick figures. Histidine 64 is indicated by the arrow. The region including residues 54-59 leading into His 64 of the triad are also shown as black stick figures.

[0316] This residue 54-59 segment of the molecule is seen to be in a loop leading into the helix that begins with Histidine 64. This residue 54-59 loop is critical in that it leads into and affects the juxtaposition of the following His64 and also that it forms part of the substrate binding surface.

[0317] Several subtilisin clades can be characterized by the sequences found between the Asp and Histidine that form the characteristic triad found in all classic serine hydrolases, both of the subtilisin and chymotrypsin type families. The conformation of the LG12-clade loop for the segment corresponding to residues 54-59 is distinctly different from that same loops found in the crystallographic models of sustilisin BPN′, subtilisin Carlsberg and Bacillus lentus proteases, as shown in FIGS. 7, 8, and 9, respectively.

[0318] In FIG. 7, the residue 54-59 sequence EPNALQ of the crystallographic structure of LG12 wild-type protease (shown as black sticks) is compared with the equivalent loop segment in subtilisin BPN′ (pdb entry 2ST1) (shown as gray lines). The proline 55 of LG12 is found at the top. The main chain conformation of the loops in subtilisin LG12 and BPN′ share the same overall fold while the sequences are quite different.

[0319] In FIG. 8, the residue 54-59 sequence EPNALQ of the crystallographic structure of LG12 wild-type protease (shown as black sticks) is compared with the equivalent loop segment in subtilisin Carlsberg (pdb entry 3UNX) (shown as gray lines). In subtilisin Carlberg, there is a radical departure in the main chain conformation in this loop relative to LG12 in the vicinity of Pro55 of LG12. In the crystallographic model, this segment shows some disorder as modelled for the tyrosine side chain in the coordinates of pdb entry 3UNX.

[0320] In FIG. 9, the residue 54-59 sequence EPNALQ of the crystallographic structure of LG12 wild-type protease (shown as black sticks) is compared with the equivalent loop segment in subtilisin from B. lentus (shown as gray lines). In the B. lentus subtilisin the main chain diverges (including a deletion of a residue in this loop in B. lentus) from that seen for LG12.

[0321] The LG12-clade sequence motif, extending from residue E54 to H67 in single letter code is EPNALQDGNGHGTH (SEQ ID NO:44) wherein the amino acid positions of the motif are numbered by correspondence with the amino acid sequence of LG12 wild-type set forth in SEQ ID NO:10.

### EXAMPLE 13

### Generation of Additional LG12-Clade Subtilisins

[0322] Additional LG12-clade variant proteases were generated using methods described in Example 2, resulting in from 2 to 13 beneficial mutations being introduced into the LG2 wild-type protease as shown in Table 13A. These additional LG12-clade protease variants demonstrated improved ADW cleaning performance and/or stability over LG2 wild-type, which data is set forth in Table 13B.

TABLE 13A
LG12-clade Variant Proteases

| | | No. |
|---|---|---|
| Sample | | Mutations |
| ID | Sequence Substitutions Relative to LG12 WT | vs LG12 |
| LG12- | N076D-G118R-G128D-S129F-S130Y-G166D- | 7 |
| 05653 | E248N | |
| LG12- | N076D-G118R-G128D-S129P-S130F-G166D- | 7 |
| 05663 | E248N | |
| LG12- | N076D-G118R-G128D-S129P-S130Y-G166D- | 7 |
| 05664 | E248N | |
| LG12- | N076D-G118R-G128E-S130R-G166D-E248N | 6 |
| 05685 | | |
| LG12- | N076D-G118R-G128H-S129K-S130W-G166D- | 7 |
| 05729 | E248N | |
| LG12- | N076D-G118R-G128H-S129M-S130Y-G166D- | 7 |
| 05734 | E248N | |
| LG12- | N076D-G118R-G128H-S129N-S130V-G166D- | 7 |
| 05735 | E248N | |
| LG12- | N076D-G118R-G128H-S129P-S130L-G166D- | 7 |
| 05736 | E248N | |
| LG12- | N076D-G118R-G128H-S129P-S130N-G166D- | 7 |
| 05737 | E248N | |
| LG12- | N076D-G118R-G128H-S129P-G166D-E248N | 6 |
| 05740 | | |
| LG12- | N076D-G118R-G128H-S129Q-S130I-G166D- | 7 |
| 05741 | E248N | |
| LG12- | N076D-G118R-G128H-S129Q-S130W-G166D- | 7 |
| 05743 | E248N | |
| LG12- | N076D-G118R-G128H-S129R-S130H-G166D- | 7 |
| 05744 | E248N | |
| LG12- | N076D-G118R-G128H-S130I-G166D-E248N | 6 |
| 05746 | | |
| LG12- | N076D-G118R-G128H-S129T-S130H-G166D- | 7 |
| 05747 | E248N | |
| LG12- | N076D-G118R-G128H-S129T-S130T-G166D- | 7 |
| 05748 | E248N | |
| LG12- | N076D-G118R-G128H-S129V-S130H-G166D- | 7 |
| 05749 | E248N | |
| LG12- | N076D-G118R-G128Q-S129R-S130N-G166D- | 7 |
| 05865 | E248N | |
| LG12- | N076D-G118R-G128R-S129V-S130E-G166D- | 7 |
| 05890 | E248N | |
| LG12- | N076D-G118R-G128S-S129P-S130A-G166D- | 7 |
| 05909 | E248N | |
| LG12- | N076D-G118R-G128S-S129V-S130Q-G166D- | 7 |
| 05913 | E248N | |
| LG12- | N076D-G118R-G128T-S129K-S130L-G166D- | 7 |
| 05924 | E248N | |
| LG12- | N076D-G118R-G128V-S129H-S130E-G166D- | 7 |
| 05958 | E248N | |
| LG12- | N076D-G118R-G128V-S129M-S130H-G166D- | 7 |
| 05961 | E248N | |
| LG12- | N076D-G118R-G128W-S129H-S130D-G166D- | 7 |
| 05980 | E248N | |
| LG12- | N076D-G118R-G128W-S129L-G166D-E248N | 6 |
| 05984 | | |
| LG12- | N076D-G118R-G128W-S129Q-S130F-G166D- | 7 |
| 05986 | E248N | |
| LG12- | N076D-G118R-G128W-S129Y-S130D-G166D- | 7 |
| 05993 | E248N | |
| LG12- | N076D-G118R-G128Y-S129P-S130D-G166D- | 7 |
| 06010 | E248N | |
| LG12- | N076D-G118R-G128Y-S129V-S130M-G166D- | 7 |
| 06017 | E248N | |
| LG12- | G128T-S129H-S130D-G166D-E248N | 5 |
| 06024 | | |
| LG12- | G118R-G128L-S129M-S130N-G166D-E248N | 6 |
| 06025 | | |
| LG12- | N038T-S156H-G166Y-M222L | 4 |
| 06581 | | |
| LG12- | G053D-N076D-G118R-N256R-S272K | 5 |
| 06945 | | |
| LG12- | N076D-G118R-G166D-N256R | 4 |
| 06971 | | |
| LG12- | A001G-A040D-A048Q-S052T-G053E-Y091H- | 13 |
| 07057 | S114T-I147A-S156N-S159N-G166H-S182E- | |
| | Y238F | |
| LG12- | A048E-S052T-V149G-S156N-G166D-F217R | 6 |
| 07078 | | |
| LG12- | S052T-V149G-S156N-S159D-G166H-F217R | 6 |
| 07088 | | |
| LG12- | S159D-G166D-S182E-F217R | 4 |
| 07189 | | |
| LG12- | G100A-G128H-S129F-S272K | 4 |
| 07525 | | |
| LG12- | N038Q-S052T-G100A-N117S-G118R-G128H | 6 |
| 07638 | | |
| LG12- | A040D-S052Q-G118R-G128M-S130Y-G166H- | 13 |
| 07890 | Y238F-N269K-V270C-E271G-S272K-A273V- | |
| | Q275Y | |
| LG12- | S052T-N076D-G118R-G128M-S129V-S130F- | 8 |
| 07990 | G166H-Y238F | |
| LG12- | A040D-S052T-N076D-G128M-S129F-S130Y- | 7 |
| 07997 | G166H | |
| LG12- | S052T-N076D-G128S-S129F-S130F | 5 |
| 08062 | | |
| LG12- | S052T-S129F | 2 |
| 08079 | | |
| LG12- | N076D-G118R-G128M-S129F-S130F-Y238F | 6 |
| 08114 | | |
| LG12- | A040D-S052Q-N076D-G128S-S129F-S130Y- | 7 |
| 08137 | Y238F | |
| LG12- | K027M-G053Y-G128D-S129R-S130I-G166D- | 10 |
| 08219 | F217R-E248K-N256E-S272K | |
| LG12- | G007C-S052T-N076D-G128D-S129R-S130I- | 10 |
| 08225 | S156N-G166D-F217R-S272K | |
| LG12- | G128D-S129R-S130I-S156T-G166D-F217R- | 7 |
| 08281 | S272K | |
| LG12- | S052T-N076D-G118R-G128D-S129R-S130I- | 9 |
| 08308 | G166D-F217R-N256R | |
| LG12- | G128D-S129R-S130I-G166H-F217R-S272K | 6 |
| 08355 | | |
| LG12- | G053D-G118R-G128D-S129R-S130I-S156N- | 9 |
| 08419 | G166D-F217R-E248K | |
| LG12- | S052T-G053Y-N076D-G118R-G128D-S129F- | 12 |
| 08478 | S130Y-S156N-G166D-F217R-N256E-S272K | |
| LG12- | S052T-G053D-N076D-G128D-S129F-S130Y- | 10 |
| 08598 | S156N-F217R-N256E-S272K | |
| LG12- | S052F-N076D-G118R-G128D-S129F-S130Y- | 11 |
| 08634 | S156N-G166D-F217R-E248N-S272K | |
| LG12- | S052F-G053Y-N076D-G118R-G128D-S129F- | 13 |
| 08636 | S130Y-S156N-G166D-F217R-E248N-N256E- | |
| | S272K | |
| LG12- | S052F-N076D-G118R-G128D-S129F-S130Y- | 9 |
| 08653 | G166D-F217R-E248N | |
| LG12- | N076D-G118R-G128D-S129F-S130Y-G166D- | 10 |
| 08677 | F217R-E248N-N256E-S272K | |
| LG12- | N076D-G118R-G128D-S129F-S130Y-G166D- | 9 |
| 08680 | F217R-E248N-N256E | |
| LG12- | N076D-G118R-G128D-S129F-S130Y-S156N- | 9 |
| 08684 | G166D-F217R-E248N | |
| LG12- | S052T-N076D-G118R-G128D-S129F-S130Y- | 10 |
| 08705 | G166D-F217R-E248N-S272K | |
| LG12- | N076D-G118R-G128D-S129F-S130Y-S156N- | 10 |
| 08706 | G166D-F217R-E248N-S272K | |
| LG12- | S052F-G053Y-N076D-G118R-G128D-S129F- | 12 |
| 08721 | S130Y-G166D-F217R-E248N-N256R-S272K | |
| LG12- | S052T-G053Y-N076D-G118R-G128D-S129F- | 10 |
| 08727 | S130Y-S156N-G166D-E248N | |
| LG12- | S052F-N076D-G118R-G128D-S129F-S130Y- | 11 |
| 08731 | G166D-F217R-E248N-N256E-S272K | |
| LG12- | S052F-N076D-G118R-G128D-S129F-S130Y- | 10 |
| 08740 | G166D-F217R-E248N-N256E | |
| LG12- | G007C-S052T-G053D-N076D-G118R-G128D- | 12 |
| 08755 | S129F-S130Y-G166D-F217R-E248N-N256E | |
| LG12- | S052F-G053Y-N076D-G118R-G128D-S129F- | 11 |
| 08756 | S130Y-G166D-E248N-N256E-S272K | |
| LG12- | N076D-G118R-G128D-S129F-S130Y-S156N- | 9 |
| 08759 | G166D-E248N-S272K | |
| LG12- | S052F-G053Y-G118R-G128D-S129F-S130Y- | 11 |
| 08764 | S156N-G166D-E248N-N256E-S272K | |
| LG12- | G053D-N076D-G118R-G128D-S129F-S130Y- | 9 |
| 08780 | G166D-E248N-S272K | |
| LG12- | S052F-N076D-G118R-G128D-S129F-S130Y- | 10 |
| 08781 | G166D-F217R-E248N-Q275R | |
| LG12- | S052F-N076D-G118R-G128D-S129F-S130Y- | 10 |
| 08830 | G166D-F217R-E248N-N256R | |
| LG12- | S052F-N076D-G118R-G128D-S129F-S130Y- | 11 |
| 08841 | G166D-F217R-E248N-N256R-S272K | |
| LG12- | S052F-N076D-G118R-G128D-S129F-S130Y- | 10 |
| 08843 | G166D-F217R-E248N-S272K | |
| LG12- | S052F-G053Y-N076D-G118R-G128D-S129F- | 11 |
| 08863 | S130Y-G166D-F217R-E248N-S272K | |
| LG12- | S052F-N076D-G118R-G128D-S129F-S130Y- | 11 |
| 08867 | G166H-F217R-E248N-N256E-S272K | |
| LG12- | S052T-G053Y-N076D-G118R-G128D-S129F- | 11 |
| 08870 | S130Y-S156N-G166D-E248N-S272K | |
| LG12- | S052T-N076D-G118R-G128D-S129F-S130Y- | 11 |
| 08875 | S156N-G166D-E248N-N256E-S272K | |
| LG12- | N076D-G118R-G128D-S129F-S130Y-S156N- | 9 |
| 08883 | G166D-E248N-N256R | |
| LG12- | S052T-N076D-G118R-G128D-S129F-S130Y- | 11 |
| 08888 | S156N-G166H-F217R-E248N-N256R | |
| LG12- | S052F-N076D-G118R-G128D-S129F-S130Y- | 10 |
| 08904 | S156N-G166D-E248N-S272K | |
| LG12- | N076D-G118R-I122V-G128D-S129F-S130Y- | 9 |
| 08913 | G166D-F217R-E248N | |
| LG12- | S052T-N076D-G118R-G128D-S129F-S130Y- | 10 |
| 08921 | G166D-F217R-E248N-N256R | |
| LG12- | S052F-G053Y-N076D-G118R-G128D-S129F- | 11 |
| 08933 | S130Y-G166D-F217R-E248N-N256E | |
| LG12- | S052F-N076D-G118R-G128D-S129F-S130Y- | 9 |
| 08940 | S156N-G166D-E248N | |
| LG12- | S052T-G128V-S129M-S130H-S156D-G166D- | 9 |
| 08957 | F217R-E248N-S272K | |
| LG12- | G128V-S129M-S130H-G166D-F217R-E248N- | 7 |
| 08960 | S272K | |
| LG12- | S052T-G053Y-G128V-S129M-S130H-S156D- | 10 |
| 08968 | G166H-F217R-E248N-N256E | |
| LG12- | G128V-S129M-S130H-G166D-E248N-S272K | 6 |
| 08981 | | |
| LG12- | S052T-N076D-G128V-S129M-S130H-G166D- | 10 |
| 08982 | F217R-E248N-N256E-S272K | |
| LG12- | S052T-N076D-G118R-G128V-S129M-S130H- | 10 |
| 08996 | G166D-F217R-N256E-S272K | |
| LG12- | N076D-G128V-S129M-S130H-S156D-G166D- | 9 |
| 09018 | F217R-E248N-S272K | |
| LG12- | S052T-G128V-S129M-S130H-G166D-F217R- | 9 |
| 09029 | E248N-N256E-S272K | |
| LG12- | S052T-N076D-G118R-G128V-S129M-S130H- | 9 |
| 09062 | G166D-217R-S272K | |
| LG12- | S052T-G118R-G128V-S129M-S130H-G166D- | 8 |
| 09071 | F217R-S272K | |
| LG12- | G118R-G128V-S129M-S130H-S156D-G166D- | 8 |
| 09079 | F217R-E248N | |
| LG12- | S052T-N076D-G118R-G128V-S129M-S130H- | 11 |
| 09092 | G166D-F217R-E248N-N256E-S272K | |
| LG12- | N076D-G118R-G128V-S129M-S130H-S156D- | 9 |
| 09107 | G166D-F217R-E248N | |
| LG12- | S052T-G053Y-G128V-S129M-S130H-S156D- | 10 |
| 09111 | G166H-F217R-N256E-S272K | |
| LG12- | G128V-S129M-S130H-G166D-F217R-E248N | 6 |
| 09112 | | |
| LG12- | S052T-G053Y-G128V-S129M-S130H-G166D- | 8 |
| 09119 | E248N-S272K | |
| LG12- | S052T-G053Y-N076D-G118R-G128V-S129M- | 10 |
| 09124 | S130H-G166D-F217R-E248N | |
| LG12- | G053Y-G118R-G128V-S129M-S130H-G166D- | 9 |
| 09142 | E248N-N256E-S272K | |
| LG12- | G128V-S129M-S130H-G166D-F217R-E248D- | 7 |
| 09147 | S272K | |
| LG12- | G128V-S129M-S130H-G166D-E248N | 5 |
| 09156 | | |
| LG12- | N076D-G118R-G128V-S129M-S130H-G166D- | 9 |
| 09158 | E248N-N256E-S272K | |
| LG12- | S052T-G053Y-N076D-G118R-G128V-S129M- | 12 |
| 09167 | S130H-S156D-G166D-F217R-E248N-S272K | |
| LG12- | S052T-N076D-G118R-G128V-S129M-S130H- | 10 |
| 09176 | G166D-E248N-N256E-S272K | |
| LG12- | N076D-G118R-GI28V-S129M-S130H-G166D- | 7 |
| 09210 | F217R | |
| LG12- | S052T-N076D-G118R-G128V-S129M-S130H- | 12 |
| 09245 | S156D-G166D-F217R-E248N-N256E-S272K | |
| LG12- | G128V-S129M-S130H-F217R-E248N | 5 |
| 09260 | | |

TABLE 13B
Cleaning performance of Additional
LG12-clade Variants, Reported as PI

| | PAS-38 in | | |
|---|---|---|---|
| Sample ID | GSM-B | Stability TRIS-CA | Stability TRIS-EDTA |
| LG12 WT | 1.0 | 1.0 | 1.0 |
| LG12-05653 | 2.6 | 0.4 | 0.5 |
| LG12-05663 | 2.6 | 2.2 | 1.8 |
| LG12-05664 | 2.8 | 2.5 | 2.0 |
| LG12-05685 | 2.6 | 1.6 | 1.2 |
| LG12-05729 | 4.0 | 2.5 | 1.8 |
| LG12-05734 | 2.9 | 1.9 | 1.4 |
| LG12-05735 | 2.3 | 1.9 | 1.6 |
| LG12-05736 | 3.4 | 2.6 | 1.7 |
| LG12-05737 | 3.1 | 2.7 | 1.8 |
| LG12-05740 | 4.1 | 2.5 | 1.7 |
| LG12-05741 | 2.5 | 2.1 | 1.3 |
| LG12-05743 | 3.7 | 1.5 | 1.3 |
| LG12-05744 | 2.7 | 2.4 | 1.4 |
| LG12-05746 | 2.4 | 2.3 | 1.7 |
| LG12-05747 | 2.8 | 2.2 | 1.4 |
| LG12-05748 | 3.3 | 2.3 | 1.7 |
| LG12-05749 | 2.9 | 1.7 | 1.3 |
| LG12-05865 | 2.4 | 2.0 | 1.3 |
| LG12-05890 | 2.1 | 1.5 | 1.5 |
| LG12-05909 | 2.2 | 2.2 | 1.2 |
| LG12-05913 | 5.1 | 1.8 | 1.4 |
| LG12-05924 | 2.1 | 1.8 | 1.4 |
| LG12-05958 | 1.6 | 2.0 | 1.3 |
| LG12-05961 | 6.9 | 1.1 | 1.1 |
| LG12-05980 | 1.5 | 1.7 | 1.5 |
| LG12-05984 | 1.8 | 1.6 | 1.8 |
| LG12-05986 | 2.2 | 2.4 | 2.2 |
| LG12-05993 | 2.2 | 1.9 | 1.4 |
| LG12-06010 | 1.3 | 2.1 | 1.6 |
| LG12-06017 | 2.0 | 1.5 | 1.3 |
| LG12-06024 | 1.5 | 1.6 | 1.4 |
| LG12-06025 | 1.9 | 1.6 | 1.4 |
| LG12-06581 | 2.7 | 1.3 | 1.4 |
| LG12-06945 | 1.7 | 2.3 | 1.2 |
| LG12-06971 | 1.8 | 2.0 | 1.4 |
| LG12-07057 | 1.4 | 1.8 | 2.2 |
| LG12-07078 | 1.5 | 2.0 | 2.3 |
| LG12-07088 | 1.6 | 1.7 | 2.1 |
| LG12-07189 | 1.3 | 2.1 | 2.7 |
| LG12-07525 | 1.6 | 1.3 | 1.3 |
| LG12-07638 | 2.0 | 1.4 | 1.3 |
| LG12-07890 | 1.3 | 2.4 | 1.2 |
| LG12-07990 | 4.2 | 1.8 | 1.4 |
| LG12-07997 | 1.3 | 1.7 | 1.3 |
| LG12-08062 | 1.6 | 1.2 | 1.4 |
| LG12-08079 | 1.4 | 1.7 | 1.2 |
| LG12-08114 | 2.9 | 1.3 | 1.7 |
| LG12-08137 | 2.2 | 1.3 | 1.7 |
| LG12-08219 | 2.3 | 4.1 | 2.0 |
| LG12-08225 | 1.9 | 1.4 | 1.3 |
| LG12-08281 | 1.8 | 2.9 | 2.9 |
| LG12-08308 | 1.2 | 3.6 | 3.0 |
| LG12-08355 | 1.4 | 2.5 | 2.4 |
| LG12-08419 | 3.7 | 2.3 | 3.0 |
| LG12-08478 | 1.4 | 9.8 | 3.9 |
| LG12-08598 | 1.7 | 3.5 | 2.6 |
| LG12-08634 | 1.2 | 2.2 | 2.2 |
| LG12-08636 | 2.0 | 3.0 | 3.7 |
| LG12-08653 | 1.5 | 2.2 | 2.1 |
| LG12-08677 | 1.4 | 2.3 | 2.3 |
| LG12-08680 | 1.3 | 2.4 | 2.1 |
| LG12-08684 | 1.4 | 3.3 | 2.6 |
| LG12-08705 | 1.3 | 1.4 | 1.9 |
| LG12-08706 | 1.3 | 2.7 | 2.7 |
| LG12-08721 | 5.7 | 1.6 | 3.2 |
| LG12-08727 | 1.3 | 2.0 | 1.8 |
| LG12-08731 | 1.4 | 1.7 | 2.3 |
| LG12-08740 | 1.4 | 2.1 | 2.2 |
| LG12-08755 | 1.4 | 1.5 | 1.5 |
| LG12-08756 | 3.5 | 1.4 | 2.0 |
| LG12-08759 | 1.3 | 3.2 | 2.2 |
| LG12-08764 | 2.3 | 2.6 | 2.2 |
| LG12-08780 | 1.2 | 1.3 | 1.6 |
| LG12-08781 | 2.0 | 2.2 | 2.3 |
| LG12-08830 | 1.4 | 2.0 | 1.8 |
| LG12-08841 | 1.3 | 1.4 | 2.4 |
| LG12-08843 | 1.3 | 1.5 | 2.2 |
| LG12-08863 | 2.2 | 2.2 | 2.6 |
| LG12-08867 | 1.3 | 1.3 | 2.0 |
| LG12-08870 | 1.3 | 2.4 | 2.1 |
| LG12-08875 | 1.3 | 2.0 | 2.2 |
| LG12-08883 | 1.2 | 1.8 | 2.3 |
| LG12-08888 | 1.4 | 2.0 | 2.4 |
| LG12-08904 | 1.4 | 2.4 | 2.1 |
| LG12-08913 | 1.6 | 1.5 | 2.4 |
| LG12-08921 | 1.4 | 1.5 | 2.3 |
| LG12-08933 | 2.9 | 1.7 | 3.0 |
| LG12-08940 | 1.5 | 3.0 | 2.4 |
| LG12-08957 | 1.6 | 1.2 | 1.6 |
| LG12-08960 | 1.4 | 2.7 | 2.6 |
| LG12-08968 | 1.6 | 2.3 | 1.9 |
| LG12-08981 | 2.9 | 2.3 | 2.1 |
| LG12-08982 | 1.2 | 2.5 | 2.3 |
| LG12-08996 | 1.3 | 3.2 | 3.2 |
| LG12-09018 | 1.2 | 2.3 | 1.4 |
| LG12-09029 | 1.4 | 3.0 | 2.1 |
| LG12-09062 | 1.5 | 3.1 | 2.3 |
| LG12-09071 | 1.3 | 2.7 | 2.5 |
| LG12-09079 | 1.3 | 1.3 | 1.5 |
| LG12-09092 | 1.3 | 3.1 | 2.6 |
| LG12-09107 | 1.3 | 1.5 | 1.3 |
| LG12-09111 | 1.4 | 2.3 | 2.8 |
| LG12-09112 | 1.3 | 2.0 | 2.4 |
| LG12-09119 | 2.3 | 2.5 | 2.0 |
| LG12-09124 | 1.5 | 1.8 | 2.0 |
| LG12-09142 | 1.8 | 1.9 | 2.3 |
| LG12-09147 | 2.2 | 2.1 | 1.9 |
| LG12-09156 | 3.6 | 1.8 | 2.7 |
| LG12-09158 | 2.0 | 2.6 | 2.4 |
| LG12-09167 | 1.2 | 1.5 | 1.7 |
| LG12-09176 | 1.9 | 2.5 | 2.4 |
| LG12-09210 | 1.2 | 2.7 | 2.4 |
| LG12-09245 | 1.3 | 1.8 | 1.7 |
| LG12-09260 | 1.3 | 3.2 | 2.4 |

### EXAMPLE 14

### Generation of Additional LG12-Clade Subtilisins

[0323] Additional LG12-clade variant proteases were generated using methods described in Example 2, resulting in from 36 to 41 beneficial mutations being introduced into the LG12 wild-type protease as set forth in Table 14.

TABLE 14
LG12-clade Variant Proteases

| | | No. |
|---|---|---|
| Sample | | mutations |
| ID | Sequence Substitutions Relative to LG12 WT | vs LG12 |
| LG12- | S052A-N076D-T078S-T079I-Y086P-A088V- | 36 |
| CP00172 | D089S-S097G-T103S-L104V-G106S-I111L- | |
| | S114A-I115G-S116N-N120H-I122A-M124L- | |
| | G128S-S129P-G131P-T133A-A134T-Q136E- | |
| | C139V-N141S-Y143T-N144S-I147V-V148L- | |
| | I150V-S158T-G166D-F217L-A224T-E248N | |
| LG12- | S052A-N076D-Y086P-N087S-A088V-D089S- | 39 |
| CP00195 | S097G-T103S-L104V-G106S-I111L-S114A- | |
| | I115G-S116N-N120H-I122A-M124L-G128S- | |
| | S129P-G131P-T133A-A134T-Q136E-C139V- | |
| | N141S-Y143T-N144S-I147V-V148L-I150V- | |
| | S158T-G166D-T209Y-N212S-N213T-S216T- | |
| | F217L-A224T-E248N | |
| LG12- | A001T-N076D-T078S-T079I-Y086P-D089E- | 38 |
| CP00227 | S097G-T103S-L104V-G106S-I111L-S114A- | |
| | I115G-S116N-N120H-I122A-M124L-G128S- | |
| | S129P-G131P-T133A-A134T-Q136E-C139V- | |
| | N141S-Y143T-N144S-I147V-V148L-I150V- | |
| | S158T-G166D-T209Y-N212S-N213T-S216T- | |
| | F217L-E248N | |
| LG12- | A001T-S052A-N076D-Y086P-N087S-A088V- | 41 |
| CP00234 | D089S-S097G-T103S-L104V-G106S-I111L- | |
| | S114A-I115G-S116N-N120H-I122A-M124L- | |
| | G128S-S129P-G131P-T133A-A134T-Q136E- | |
| | C139V-N141S-Y143T-N144S-I147V-V148L- | |
| | I150V-A153S-S158T-G166D-T209Y-N212S- | |
| | N213T-S216T-F217L-A224T-E248N | |
| LG12- | A001T-N076D-Y086P-N087S-A088V-D089S- | 40 |
| CP00376 | S097G-T103S-L104V-G106S-I111L-S114A- | |
| | I115G-S116N-N120H-I122A-M124L-G128S- | |
| | S129P-G131P-T133A-A134T-Q136E-C139V- | |
| | N141S-Y143T-N144S-I147V-V148L-I150V- | |
| | A153S-S158T-G166D-T209Y-N212S-N213T- | |
| | S216T-F217L-A224T-E248N | |
| LG12- | A001T-N076D-Y086P-N087S-A088V-D089S- | 40 |
| CP00415 | S097G-T103S-L104V-G106S-I111L-S114A- | |
| | I115G-S116N-N120H-I122A-M124L-G128S- | |
| | S129P-G131P-T133A-A134T-Q136E-C139V- | |
| | N141S-Y143T-N144S-I147V-V148L-I150V- | |
| | S158T-G166D-T209Y-N212S-N213T-S216T- | |
| | F217L-A224T-E248N-Q275H | |
| LG12- | A001T-N076D-T078S-T079I-Y086P-N087S- | 41 |
| CP00466 | A088V-D089S-S097G-T103S-L104V-G106S- | |
| | I111L-S114A-I115G-S116N-N120H-I122A- | |
| | M124L-G128S-S129P-G131P-T133A-A134T- | |
| | Q136E-C139V-N141S-Y143T-N144S-I147V- | |
| | V148L-I150V-S158T-G166D-T209Y-N212S- | |
| | N213T-S216T-F217L-A224T-E248N | |

### EXAMPLE 15

### Cleaning Performance and Stability of LG12-Clade Variant Proteases

[0324] LG12-clade protease variants generated as described in Example 14 above and LG12 wild-type protease (SEQ ID NO:10) were screened in MTP assays, as described in Example 1 to compare their cleaning performance and/or stability to LG12-CP462 protease (SEQ ID NO:7). The results of these comparisons are set forth in Table 15.

TABLE 15
Cleaning and Stability of LG12-clade Protease
Variants Compared to LG12-CP462. reported as PI

| | EMPA-116 | | CFT CS-38 | | CFT C-10 | | Stability |
|---|---|---|---|---|---|---|---|
| | Persil | | Persil | | Persil | | Persil |
| | Non- | Test | Non- | Test | Non- | Test | Non- |
| Sample ID | Bio | HDL | Bio | HDL | Bio | HDL | Bio |
| LG12-CP462 | 1.0 | 1.0 | 1.0 | 1.0 | 1.0 | 1.0 | 1.0 |
| LG12-CP00466 | 1.0 | 0.9 | 1.1 | 1.0 | 1.2 | 1.1 | 0.9 |
| LG12-CP00195 | 0.9 | 0.9 | 1.2 | 1.3 | 1.2 | 1.2 | 1.0 |
| LG12-CP00234 | 0.9 | 0.9 | 1.2 | 1.1 | 1.2 | 1.1 | 1.0 |
| LG12-CP00172 | 0.9 | 0.9 | 1.7 | 2.1 | 1.4 | 1.2 | 1.6 |
| LG12-CP00376 | 0.9 | 0.9 | 1.2 | 1.3 | 0.7 | 1.1 | 1.0 |
| LG12-CP00227 | 0.9 | 0.9 | 1.0 | 0.8 | 0.6 | 1.0 | 1.0 |
| LG12-CP00415 | 0.9 | 0.9 | 1.6 | 1.5 | 1.7 | 1.3 | 0.9 |
| LG12 WT | 0.7 | ND | 0.6 | ND | 1.2 | ND | ND |

### EXAMPLE 16

### Comparison of LG12-Clade Protease Variants to Related Molecules Identification of Homologous Proteases

[0325] Homologs were identified by a BLAST search (Altschul et al., Nucleic Acids Res, 25:3389-402, 1997) against the NCBI non-redundant protein database and the Genome Quest (GQ) Patent database with search parameters set to default values using the mature protein amino acid sequence for LG12-CP462 protease (SEQ ID NO:7) as the query sequence. Percent identity (PID) is defined as the number of identical residues divided by the number of aligned residues in the pairwise alignment. Value labeled “sequence length” on tables corresponds to the length (in amino acids) for the proteins referenced with the listed Accession numbers, while “aligned length” refers to sequence used for alignment and PID calculation. Table 16A provides a list of sequences with the PID to LG12-CP462 from the NCBI non-redundant protein database and Table 16B provides a list of sequences from the GQ patent database.

TABLE 16A
NCBI Non-redundant Protein Database Results for LG12-CP462

| | | | Sequence | Alignment |
|---|---|---|---|---|
| Accession # | PID | Organism | Length | Length |
| AAC43580 | 86.1 | Bacillus sp. | 378 | 274 |
| WP_047970940 | 82.8 | Bacillus sp. LL01 | 377 | 274 |
| KPB03414 | 80.3 | Bacillus sp. CHD6a | 377 | 274 |
| WP_010192403 | 80.3 | Bacillus sp. m3-13 | 381 | 274 |
| AAA22212.1 | 75.4 | B. alcalophilus | 380 | 272 |
| BAA02442.1 | 75.0 | B. alcalophilus | 380 | 272 |
| AFR78140 | 74.3 | synthetic construct | 269 | 272 |
| BAD11988 | 71.9 | Bacillus sp. | 376 | 274 |
| | | KSM-LD1 SA | | |
| BAD21128 | 71.0 | Bacillus sp. | 377 | 276 |
| | | KSM-LD1 SB | | |
| KJD53753 | 70.7 | B. amyloliquefaciens | 333 | 229 |
| WP_026080796 | 70.4 | B. licheniformis | 378 | 274 |
| AAG00492 | 70.4 | B. licheniformis | 379 | 274 |
| ADK11044 | 70.4 | B. licheniformis | 379 | 274 |
| WP_031314535 | 70.1 | B. licheniformis | 378 | 274 |
| EQM28932 | 70.1 | B. licheniformis | 379 | 274 |
| | | CG-B52 | | |
| AAG00493 | 70.1 | B. licheniformis | 310 | 274 |

TABLE 16B
GQ Patent Database Results for LG12-CP462

| | | | Sequence | Alignment |
|---|---|---|---|---|
| Patent ID # | PID | Organism | Length | Length |
| WO2015038792- | 86.5-85.8 | Bacillus sp.; | 275 | 274-273 |
| multiple | | LG12 Synthetic | | |
| sequences | | | | |
| WO2015038792- | 86.1 | Bacillus sp.; | 381 | 274 |
| 0004 | | LG12 | | |
| WO2015038792- | 83.6 | B. horikoshii; | 275 | 274 |
| 0019 | | DSM 69511 | | |
| WO2015038792- | 83.2 | B. horikoshii | 275 | 274 |
| 0016 | | DSM 97121 | | |
| WO2015038792- | 83.2 | B. horikoshii | 275 | 274 |
| 0010 | | DSM 87192 | | |
| WO2015038792- | 82.1 | Synthetic | 268 | 274 |
| 0027 | | Construct | | |
| WO2015038792- | 80.3 | Bacillus sp. | 275 | 274 |
| 0007 | | m3-134 | | |
| WO2015038792- | 80.3 | Bacillus sp. | 383 | 274 |
| 0006 | | m3-132 | | |
| EP1160327- | 76.1-75.7 | Bacillus sp. | 269 | 272 |
| multiple | | Synthetic | | |
| sequences | | | | |
| WO9402618 | 75.7 | Bacillus novalis | 269 | 272 |
| US20130123162- | 75.74 | B. lentus | 269 | 272 |
| multiple | | Synthetic | | |
| sequences | | | | |
| WO2011140364- | 75.7-75.4 | B. lentus | 380-377 | 272 |
| multiple | | Synthetic | | |
| sequences | | | | |
| US20140045268- | 75.4 | Synthetic | 353 | 272 |
| 0040 | | Construct | | |
| WO2015144932- | 75.4 | Artificial | 269 | 272 |
| 0006 | | Sequence, | | |
| | | B. lentus | | |

### EXAMPLE 17

### Sequence Comparison of LG12-Clade Protease Variants

[0326] Alignment of LG12-Clade Protease Variants with Other Subtilisins

[0327] The amino acid sequences of LG12 wild-type (SEQ ID NO:10): variants: LG12-CP022 (SEQ ID NO:1), LG12-CP180 (SEQ ID NO:3), LG12-CP446 (SEQ ID NO:4), LG12-CP455 (SEQ ID NO:5), LG12-CP460 (SEQ ID NO:6), LG12-CP462 (SEQ ID NO:7), LG12-CP465 (SEQ ID NO:8), LG12-05520 (SEQ ID NO:37), LG12-05522 (SEQ ID NO:38), LG12-05547 (SEQ ID NO:29), LG12-05575 (SEQ ID NO:41), LG12-06491 (SEQ ID NO:34), LG12-06943 (SEQ ID NO:42), LG12-07051 (SEQ ID NO:39), LG12-07058 (SEQ ID NO:30), LG12-07065 (SEQ ID NO:35), LG12-07075 (SEQ ID NO:36), LG12-07098 (SEQ ID NO:31), LG12-07110 (SEQ ID NO:40), LG12-07115 (SEQ ID NO:43), LG12-07118 (SEQ ID NO:33), LG12-07166 (SEQ ID NO:32), LG12-CP00172 (SEQ ID NO:59), LG12-CP00195 (SEQ ID NO:61), LG12-CP00227 (SEQ ID NO:60), LG12-CP00234 (SEQ ID NO:64), LG12-CP00376 (SEQ ID NO:62), LG12-CP00415 (SEQ ID NO:63), LG12-CP00466 (SEQ ID NO:65), LG12-05653 (SEQ ID NO:49), LG12-05668 (SEQ ID NO:50), LG12-05961 (SEQ ID NO:51), LG12-08308 (SEQ ID NO:53), LG12-08721 (SEQ ID NO:55), LG12-09176 (SEQ ID NO:54), LG12-07990 (SEQ ID NO:52), and LG12-07057 (SEQ ID NO:56); previously identified LG2-clade members: Bhon03321 (SEQ ID NO:18), DSM_9712 (SEQ ID NO:19), DSM_9711 (SEQ ID NO:45), DSM_6951 (SEQ ID NO:46), Bac.sp.WP_010192403 (SEQ ID NO:66); and more recently identified LG12-clade members: Bac.sp.LL01_WP_04797094) (SEQ ID NO:57) and Bac.sp.CHD6a_KPB03414 (SEQ ID NO:58), were aligned using CLUSTALW software (Thompson et al., Nucleic Acids Research, 22:4673-4680, 1994) with the default parameters. The alignment was performed using the following parameters: Kimura's correction for sequence distance and ignoring positions with gaps. The NJ method works on a matrix of distances between all pairs of sequences to be analyzed. These distances are related to the degree of divergence between the sequences, FIG. 10A-F shows the alignment of these protease sequences. The sequences were entered in the Vector NTI Advance suite and a Guide Tree was created using the Neighbor Joining (NJ) method (Saitou and Nei, Mol Biol Evol. 4:406-425, 1987). The tree construction was calculated using the following parameters: Kimura's correction for sequence distance and ignoring positions with gaps. AlignX displays the calculated distance values in parenthesis following the molecule name displayed on the phylogenetic tree shown in FIG. 11.

The application's sequence listing, which the Patent Office published only in electronic form, follows.

SEQUENCE LISTING (272 sequences)

SEQ ID NO: 1 - protein, 275 aa, artificial sequence
  LG12-clade protease variant
TQTVPWGIPHIKADKAHAAGVTGSGVKVAILDTGIDANHADLNVKGGASFVSGEPNALQDGNGHGTHVAGTVAALDNSIGVLGVAPNAELYAVKVLGASGSGSVSSIAQGLEWAGNNGMHVANLSLGSPSPSATLEQAVNSATSRGVLVVAAAGNSGTSGNRNTMDYPARYSSVIAVGAVSSNNTRASFSSVGSELEVMAPGVNILSTTPGNNYASFNGTSMAAPHVAGAAALIKAKYPSMTNVQIRNRLKNTATNLGDPFFYGKGVINVESALQ

SEQ ID NO: 2 - protein, 4 aa, artificial sequence
  placeholder
QQQQ

SEQ ID NO: 3 - protein, 275 aa, artificial sequence
  LG12-clade protease variant
AQTVPWGIPHIKADKAHAAGVTGSGVKVAILDTGIDANHADLNVKGGASFVAGEPNALQDGNGHGTHVAGTVAALDNSIGVLGVAPNAELYAVKVLGASGSGSVSSIAQGLEWAGNNGMHVANLSLGSPSPSVTLEQAVNSATSRGVLVVAAAGNSGTSGNRNTMDYPARYSSVIAVGAVSSNNTRASFSSVGSELEVMAPGVNILSTTPGNNYASLNGTSMAAPHVAGAAALIKAKYPSMTNVQIRNRLKNTATNLGDPFFYGKGVINVESALQ

SEQ ID NO: 4 - protein, 275 aa, artificial sequence
  LG12-clade protease variant
TQTVPWGIPHIKADKAHAAGVTGSGVKVAILDTGIDANHADLNVKGGASFVSGEPNALQDGNGHGTHVAGTVAALDNSIGVLGVAPNAELYAVKVLGASGSGSVSSIAQGLEWAGNNGMHVANLSLGSPSPSVTLEQAVNSATSRGVLVVAAAGNSGTSGNRNTMDYPARYSSVIAVGAVSSNNTRASFSSVGSELEVMAPGVNILSTYPGSTYATLNGTSMATPHVAGAAALIKAKYPSMTNVQIRNRLSSTATYLGDPFFYGKGVINVESALQ

SEQ ID NO: 5 - protein, 275 aa, artificial sequence
  LG12-clade protease variant
AQTVPWGIPHIKADKAHAAGVTGSGVKVAILDTGIDANHADLNVKGGASFVSGEPNALQDGNGHGTHVAGTVAALDNSIGVLGVAPNAELYAVKVLGASGSGSVSSIAQGLEWAGNNGMHVANLSLGSPSPSATLEQAVNSATSRGVLVVAAAGNSGTSGNRNTMDYPARYSSVIAVGAVSSNNTRASFSSVGSELEVMAPGVNILSTYPGSTYATLNGTSMATPHVAGAAALIKAKYPSMTNVQIRNRLKNTATNLGDPFFYGKGVINVESALQ

SEQ ID NO: 6 - protein, 275 aa, artificial sequence
  LG12-clade protease variant
AQTVPWGIPHIKADKAHAAGVTGSGVKVAILDTGIDANHADLNVKGGASFVSGEPNALQDGNGHGTHVAGTVAALDNSIGVLGVAPSVSLYAVKVLGASGSGSVSSIAQGLEWAGNNGMHVANLSLGSPSPSATLEQAVNSATSRGVLVVAAAGNSGTSGNRNTMDYPARYSSVIAVGAVSSNNTRASFSSVGSELEVMAPGVNILSTTPGNNYASLNGTSMAAPHVAGAAALIKAKYPSMTNVQIRNRLKNTATNLGDPFFYGKGVINVESALQ

SEQ ID NO: 7 - protein, 275 aa, artificial sequence
  LG12-clade protease variant
TQTVPWGIPHIKADKAHAAGVTGSGVKVAILDTGIDANHADLNVKGGASFVSGEPNALQDGNGHGTHVAGTVAALDNSIGVLGVAPNAELYAVKVLGASGSGSVSSIAQGLEWAGNNGMHVANLSLGSPSPSATLEQAVNSATSRGVLVVAAAGNSGTSGNRNTMDYPARYSSVIAVGAVSSNNTRASFSSVGSELEVMAPGVNILSTYPGSTYATLNGTSMATPHVAGAAALIKAKYPSMTNVQIRNRLKNTATNLGDPFFYGKGVINVESALQ

SEQ ID NO: 8 - protein, 275 aa, artificial sequence
  LG12-clade protease variant
TQTVPWGIPHIKADKAHAAGVTGSGVKVAILDTGIDANHADLNVKGGASFVSGEPNALQDGNGHGTHVAGTVAALDNSIGVLGVAPSVSLYAVKVLGASGSGSVSSIAQGLEWAGNNGMHVANLSLGSPSPSATLEQAVNSATSRGVLVVAAAGNSGTSGNRNTMDYPARYSSVIAVGAVSSNNTRASFSSVGSELEVMAPGVNILSTYPGSTYATLNGTSMAAPHVAGAAALIKAKYPSMTNVQIRNRLKNTATNLGDPFFYGKGVINVESALQ

SEQ ID NO: 9 - DNA, 828 bp, artificial sequence
  LG12-clade protease variant
acgcaaacagtgccatggggaattcctcatatcaaagccgacaaagcccatgctgctggagtgacaggttctggtgtaaaagttgctatcctcgatacaggtattgacgcaaaccatgccgacttaaatgtaaaaggtggcgctagctttgtatctggggaaccaaatgctcttcaagatgggaatgggcatggcacgcatgtggctgggacggtagctgctttagataattcgattggcgttcttggcgtagcaccgaacgcggaactatacgctgttaaagtattaggggcgagcggttcaggttcggtcagctcgattgcccaaggattggaatgggcagggaacaatggcatgcacgttgctaatttgagtttaggaagcccttcgccaagtgccacacttgagcaagctgttaatagcgcgacttctagaggcgttcttgttgtagcggcagctgggaattcaggtacatcaggcaatcggaatacgatggattatccggcccgttatagctctgtaatcgcagtcggagctgttagtagcaacaacactcgcgccagcttttcaagtgtaggcagtgaacttgaagtaatggcaccaggtgtaaacattttgagcacaactcctggtaacaattatgccagcttcaacggtacatcgatggctgctcctcatgttgcaggtgcagcagcccttatcaaagcgaagtacccatctatgacaaatgtacaaatccgcaatcgtctaaagaatacggcaacgaatttaggagatcctttcttctatggaaaaggagtcatcaatgtggaaagtgcattacaataa

SEQ ID NO: 10 - protein, 275 aa, Bacillus sp.
AQTVPWGIPHIKADKAHAAGVTGSGVKVAILDTGIDANHADLNVKGGASFVSGEPNALQDGNGHGTHVAGTVAALNNTTGVLGVAYNADLYAVKVLSASGSGTLSGIAQGIEWSISNGMNVINMSLGGSSGSTALQQACNNAYNRGIVVIAAAGNSGSSGNRNTMGYPARYSSVIAVGAVSSNNTRASFSSVGSELEVMAPGVNILSTTPGNNYASFNGTSMAAPHVAGAAALIKAKYPSMTNVQIRERLKNTATNLGDPFFYGKGVINVESALQ

SEQ ID NO: 11 - DNA, 10 bp, artificial sequence
  placeholder
aaaaaaaaaa

SEQ ID NO: 12 - DNA, 828 bp, artificial sequence
  LG12-clade protease variant
gcgcaaacagtgccatggggaattcctcatatcaaagccgacaaagcccatgctgctggagtgacaggttctggtgtaaaagttgctatcctcgatacaggtattgacgcaaaccatgccgacttaaatgtaaaaggtggcgctagctttgtagctggggaaccaaatgctcttcaagatgggaatgggcatggcacgcatgtggctgggacggtagctgctttagataattcgattggcgttcttggcgtagcaccgaacgcggaactatacgctgttaaagtattaggggcgagcggttcaggttcggtcagctcgattgcccaaggattggaatgggcagggaacaatggcatgcacgttgctaatttgagtttaggaagcccttcgccaagtgtcacacttgagcaagctgttaatagcgcgacttctagaggcgttcttgttgtagcggcagctgggaattcaggtacatcaggcaatcggaatacgatggattatccggcccgttatagctctgtaatcgcagtcggagctgttagtagcaacaacactcgcgccagcttttcaagtgtaggcagtgaacttgaagtaatggcaccaggtgtaaacattttgagcacaactcctggtaacaattatgccagcttaaacggtacatcgatggctgctcctcatgttgcaggtgcagcagcccttatcaaagcgaagtacccatctatgacaaatgtacaaatccgcaatcgtctaaagaatacggcaacgaatttaggagatcctttcttctatggaaaaggagtcatcaatgtggaaagtgcattacaataa

SEQ ID NO: 13 - DNA, 825 bp, artificial sequence
  LG12-clade protease variant
acgcaaacagtgccatggggaattcctcatatcaaagccgacaaagcccatgctgctggagtgacaggttctggtgtaaaagttgctatcctcgatacaggtattgacgcaaaccatgccgacttaaatgtaaaaggtggcgctagctttgtatctggggaaccaaatgctcttcaagatgggaatgggcatggcacgcatgtggctgggacggtagctgctttagataattcgattggcgttcttggcgtagcaccgaacgcggaactatacgctgttaaagtattaggggcgagcggttcaggttcggtcagctcgattgcccaaggattggaatgggcagggaacaatggcatgcacgttgctaatttgagtttaggaagcccttcgccaagtgtcacacttgagcaagctgttaatagcgcgacttctagaggcgttcttgttgtagcggcagctgggaattcaggtacatcaggcaatcggaatacgatggattatccggcccgttatagctctgtaatcgcagtcggagctgttagtagcaacaacactcgcgccagcttttcaagtgtaggcagtgaacttgaagtaatggcaccaggtgtaaacattttgagcacatacccaggttcaacgtatgccacattaaacggtacatcgatggctactcctcatgttgcaggtgcagcagcccttatcaaagcgaagtacccatctatgacaaatgtacaaatccgcaatcgtctatccagcacggcaacgtatttaggagatcctttcttctatggaaaaggagtcatcaatgtggaaagtgcattacaa

SEQ ID NO: 14 - DNA, 825 bp, artificial sequence
  LG12-clade protease variant
gcgcaaacagtgccatggggaattcctcatatcaaagccgacaaagcccatgctgctggagtgacaggttctggtgtaaaagttgctatcctcgatacaggtattgacgcaaaccatgccgacttaaatgtaaaaggtggcgctagctttgtatctggggaaccaaatgctcttcaagatgggaatgggcatggcacgcatgtggctgggacggtagctgctttagataattcgattggcgttcttggcgtagcaccgaacgcggaactatacgctgttaaagtattaggggcgagcggttcaggttcggtcagctcgattgcccaaggattggaatgggcagggaacaatggcatgcacgttgctaatttgagtttaggaagcccttcgccaagtgccacacttgagcaagctgttaatagcgcgacttctagaggcgttcttgttgtagcggcagctgggaattcaggtacatcaggcaatcggaatacgatggattatccggcccgttatagctctgtaatcgcagtcggagctgttagtagcaacaacactcgcgccagcttttcaagtgtaggcagtgaacttgaagtaatggcaccaggtgtaaacattttgagcacatacccaggttcaacgtatgccacattaaacggtacatcgatggctactcctcatgttgcaggtgcagcagcccttatcaaagcgaagtacccatctatgacaaatgtacaaatccgcaatcgtctaaagaatacggcaacgaatttaggagatcctttcttctatggaaaaggagtcatcaatgtggaaagtgcattacaa

SEQ ID NO: 15 - DNA, 825 bp, artificial sequence
  LG12-clade protease variant
gcgcaaacagtgccatggggaattcctcatatcaaagccgacaaagcccatgctgctggagtgacaggttctggtgtaaaagttgctatcctcgatacaggtattgacgcaaaccatgccgacttaaatgtaaaaggtggcgctagctttgtatctggggaaccaaatgctcttcaagatgggaatgggcatggcacgcatgtggctgggacggtagctgctttagataattcgattggcgttcttggcgtagcaccgagcgtatccctatacgctgttaaagtattaggggcgagcggttcaggttcggtcagctcgattgcccaaggattggaatgggcagggaacaatggcatgcacgttgctaatttgagtttaggaagcccttcgccaagtgccacacttgagcaagctgttaatagcgcgacttctagaggcgttcttgttgtagcggcagctgggaattcaggtacatcaggcaatcggaatacgatggattatccggcccgttatagctctgtaatcgcagtcggagctgttagtagcaacaacactcgcgccagcttttcaagtgtaggcagtgaacttgaagtaatggcaccaggtgtaaacattttgagcacaactcctggtaacaattatgccagcttaaacggtacatcgatggctgctcctcatgttgcaggtgcagcagcccttatcaaagcgaagtacccatctatgacaaatgtacaaatccgcaatcgtctaaagaatacggcaacgaatttaggagatcctttcttctatggaaaaggagtcatcaatgtggaaagtgcattacaa

SEQ ID NO: 16 - DNA, 825 bp, artificial sequence
  LG12-clade protease variant
acgcaaacagtgccatggggaattcctcatatcaaagccgacaaagcccatgctgctggagtgacaggttctggtgtaaaagttgctatcctcgatacaggtattgacgcaaaccatgccgacttaaatgtaaaaggtggcgctagctttgtatctggggaaccaaatgctcttcaagatgggaatgggcatggcacgcatgtggctgggacggtagctgctttagataattcgattggcgttcttggcgtagcaccgaacgcggaactatacgctgttaaagtattaggggcgagcggttcaggttcggtcagctcgattgcccaaggattggaatgggcagggaacaatggcatgcacgttgctaatttgagtttaggaagcccttcgccaagtgccacacttgagcaagctgttaatagcgcgacttctagaggcgttcttgttgtagcggcagctgggaattcaggtacatcaggcaatcggaatacgatggattatccggcccgttatagctctgtaatcgcagtcggagctgttagtagcaacaacactcgcgccagcttttcaagtgtaggcagtgaacttgaagtaatggcaccaggtgtaaacattttgagcacatacccaggttcaacgtatgccacattaaacggtacatcgatggctactcctcatgttgcaggtgcagcagcccttatcaaagcgaagtacccatctatgacaaatgtacaaatccgcaatcgtctaaagaatacggcaacgaatttaggagatcctttcttctatggaaaaggagtcatcaatgtggaaagtgcattacaa

SEQ ID NO: 17 - DNA, 825 bp, artificial sequence
  LG12-clade protease variant
acgcaaacagtgccatggggaattcctcatatcaaagccgacaaagcccatgctgctggagtgacaggttctggtgtaaaagttgctatcctcgatacaggtattgacgcaaaccatgccgacttaaatgtaaaaggtggcgctagctttgtatctggggaaccaaatgctcttcaagatgggaatgggcatggcacgcatgtggctgggacggtagctgctttagataattcgattggcgttcttggcgtagcaccgagcgtatccctatacgctgttaaagtattaggggcgagcggttcaggttcggtcagctcgattgcccaaggattggaatgggcagggaacaatggcatgcacgttgctaatttgagtttaggaagcccttcgccaagtgccacacttgagcaagctgttaatagcgcgacttctagaggcgttcttgttgtagcggcagctgggaattcaggtacatcaggcaatcggaatacgatggattatccggcccgttatagctctgtaatcgcagtcggagctgttagtagcaacaacactcgcgccagcttttcaagtgtaggcagtgaacttgaagtaatggcaccaggtgtaaacattttgagcacgtacccaggttcaacgtatgccacattaaacggtacatcgatggctgctcctcatgttgcaggtgcagcagcccttatcaaagcgaagtacccatctatgacaaatgtacaaatccgcaatcgtctaaagaatacggcaacgaatttaggagatcctttcttctatggaaaaggagtcatcaatgtggaaagtgcattacaa

SEQ ID NO: 18 - protein, 275 aa, Bacillus sp.
AQTVPWGIPHIKADKAHAAGVTGSGVKVAILDTGIDANHADLNVRGGASFVAGEPNALQDGNGHGTHVAGTVAALNNSTGVLGVAYNADLYAVKVLSASGSGTLSGIAQGIEWSIANGMDVINMSLGGSSGSTALQQACNNAYNRGIVVIAAAGNSGSSGNRNTIGYPARYSSVIAVGAVDSNNNRASFSSVGNELEVMAPGANILSTTPGNNYASFNGTSMAAPHVAGAAALIKAKYPSMTNVQIRDRLRNTATNLGDPFFYGNGVINVESALQ

SEQ ID NO: 19 - protein, 275 aa, Bacillus horikoshii
AQTVPWGIPHIKADKAHAAGVTGSGVKVAILDTGIDANHADLNVKGGASFVSGEPNALQDGNGHGTHVAGTVAALNNTTGVLGVAYNADLYAVKVLNASGSGTLSGIAQGIEWSIANGMDVINMSLGGSTGSTALQQASNNAYNRGIVVIAAAGNSGSLGNRNTIGYPARYSSVIAVGAVDSNNNRASFSSVGSELEVMAPGVNILSTTPGNNYASFNGTSMAAPHVAGAAALIKAKYPNMTNVQIRDRLRNTATNLGDPFFYGRGVINVESALQ

SEQ ID NO: 20 - protein, 4 aa, artificial sequence
  placeholder
QQQQ

SEQ ID NO: 21 - protein, 275 aa, Bacillus amyloliquefaciens [sequence omitted]

SEQ ID NO: 22 - protein, 269 aa, Bacillus lentus
AQSVPWGISRVQAPAAHNRGLTGSGVKVAVLDTGISTHPDLNIRGGASFVPGEPSTQDGNGHGTHVAGTIAALNNSIGVLGVAPSAELYAVKVLGASGSGSVSSIAQGLEWAGNNGMHVANLSLGSPSPSATLEQAVNSATSRGVLVVAASGNSGAGSISYPARYANAMAVGATDQNNNRASFSQYGAGLDIVAPGVNVQSTYPGSTYASLNGTSMATPHVAGAAALVKQKNPSWSNVQIRNHLKNTATSLGSTNLYGSGLVNAEAATR

SEQ ID NO: 23 - protein, 274 aa, Bacillus licheniformis
AQTVPYGIPLIKADKVQAQGFKGANVKVAVLDTGIQASHPDLNVVGGASFVAGEAYNTDGNGHGTHVAGTVAALDNTTGVLGVAPSVSLYAVKVLNSSGSGSYSGIVSGIEWATTNGMDVINMSLGGASGSTAMKQAVDNAYARGVVVVAAAGNSGSSGNTNTIGYPAKYDSVIAVGAVDSNSNRASFSSVGAELEVMAPGAGVYSTYPTNTYATLNGTSMASPHVAGAAALILSKHPNLSASQVRNRLSSTATYLGSSFYYGKGLINVEAAAQ

SEQ ID NO: 24 - protein, 269 aa, Bacillus gibsonii
QQTVPWGITRVQAPAVHNRGITGSGVRVAILDSGISAHSDLNIRGGASFVPGEPTTADLNGHGTHVAGTVAALNNSIGVIGVAPNAELYAVKVLGANGSGSVSGIAQGLEWAATNNMHIANMSLGSDFPSSTLERAVNYATSRDVLVIAATGNNGSGSVGYPARYANAMAVGATDQNNRRANFSQYGTGIDIVAPGVNVQSTYPGNRYVSMNGTSMATPHVAGAAALVKQRYPSWNATQIRNHLKNTATNLGNSSQFGSGLVNAEAATR

SEQ ID NO: 25 - protein, 277 aa, Bacillus agaradhaerens
QQQTPWGITRVQGIAAQSQGYTGNNVKVAVLDSGIDRSHPDLSANVRGGYSVFGDSPYNDGNGHGTHVAGTVGAVNNNIGVIGVAPQADLYAVKVLNNSGSGSYAGIAQGIEWSINNGMDIINMSLGGSSSSSILEQYCNLAYNRGLLVVAAAGNSGTAAGNTNTVGYPARYNSVIAVAATNSNNVRANFSSTGPTVELSAPGVSVLSTTPGGNYASYNGTSMASPHVAGVAAQVWQARPNLSNAQLRQILNASAQNLGSSYQYGNGLVRSLNAIQY

SEQ ID NO: 26 - protein, 276 aa, Bacillus sp.
MHPNQQWHYNMINAPQAWGTTTGSSSVIQAVLDTGIDHNHQSLANLVNTSLGQSFVGGSTMDVQGHGTHVAGTIASYGSVSGVMHNATLVPVKVLNDSGSGSLFGITQGILYSADIGADVINMSLGGGGYNQSMAEAAQTAVNAGSIVIAASGNDGAGSISYPAAYSSVIAVGSVTSTGARSNFSNYGSGLELMAPGSNIYSTVPNNGYATFSGTSMASPHAAGVAGLMRAVNPNLSVSNARSIMQNTAQYAGSPTFYGYGIVDANAAVQQASGGS

SEQ ID NO: 27 - protein, 269 aa, Bacillus sp.
AQAIPWGISQISAPEAQIAGFTGEGVNVAVLDTGIEDHPDLNVQGGVSFVQGEPDYQDGNGHGTHVAGTIAALDNDEGVIGVAPNADLYAVKVLGANGSGSVSSIAQGLEWAGENGMDIANLSLGSSAPSATLEQAVDEATANGVLVVAASGNSGASSIGYPARYDNAMAVGATDQSDGLASFSQYGDGLDIVAPGVGIDSTYPGSSYDSLSGTSMATPHVAGAAALVKEKNPLWSNEQIRAHLNETATDLGDMYRFGNGLLNAHAAVE

SEQ ID NO: 28 - protein, 276 aa, Bacillus sp.
SQTVPYGIENIGAVDVQQNDGNTGDGVSVAVLDTGIQPHEDLNVLGGASFISDEPTWEDFNGHGTHVAGTVAALDNDLGVLGVSPDVDLYAVKVLGASGGGSHASIAQGIEWAVQNDMDIVNMSLGSSTGSTTLRQAVDYAHGEGVTLVAAAGNSGSFLFLNTIGYPAKYDNVIAVGAVDENNSRASFSSVGNQLDVMAPGVATHSTYLDNSYASLSGTSMASPHVAGAAALLLAHNPVVTNEGIREALNSTAIPLGSHFYYGNGVIDVRAALEAQ

SEQ ID NO: 29 - protein, 275 aa, artificial sequence
  LG12-clade protease variant
GQTVPWGIPHIKADKAHAAGVTGSGVKVAVLDTGIDANHADLNVKGGASFVSGEPNALQDGNGHGTHVAGTVAALNNDTGVLGVAYNADLYATKVLSASGSGELSGIAQGIEWSISNGMNVINMSLGGSSGSTALQQACNNAYNRGIVVIAAAGNNGSDGNRNTMSYPARYSSVIAVGAVSSNNTRASFSSVGPELEVMAPGVNILSTTPGNNYASRNGTSMAAPHVAGAAALIKNKYPSMTNVQIRERLKNTATNLGDPFFYGKGVINVESALQ

SEQ ID NO: 30 - protein, 275 aa, artificial sequence
  LG12-clade protease variant
AQTVPWGIPHIKADKAHAAGVTGSGVKVAILDTGIDANHADLNVKGGASFVTGEPNALQDGNGHGTHVAGTVAALNNTTGVLGVAYNADLYAVKVLSASGSGTLSGIAQGIEWSISNGMNVINMSLGGSSGSTALQQACNNAYNRGIVGIAAAGNNGSSGNRNTMHYPARYSSVIAVGAVSSNNTRASFSSVGSELEVMAPGVNILSTTPGNNYASRNGTSMAAPHVAGAAALIKAKYPSMTNVQIRERLKNTATNLGDPFFYGKGVINVESALQ

SEQ ID NO: 31 - protein, 275 aa, artificial sequence
  LG12-clade protease variant
AQTVPWGIPHIKADKAHAAGVTGSGVKVAILDTGIDANHADLNVKGGASFVTGEPNALQDGNGHGTHVAGTVAALNNTTGVLGVAYNADLYAVKVLSASGSGTLSGIAQGIEWSISNGMNVINMSLGGSSGSTALQQACNNAYNRGIVGIAAAGNNGSDGNRNTMDYPARYSSVIAVGAVSSNNTRASFSSVGSELEVMAPGVNILSTTPGNNYASRNGTSMAAPHVAGAAALIKAKYPSMTNVQIRERLKNTATNLGDPFFYGKGVINVESALQ

SEQ ID NO: 32 - protein, 275 aa, artificial sequence
  LG12-clade protease variant
AQTVPWGIPHIKADKAHAAGVTGSGVKVAILDTGIDANHADLNVKGGASFVTGEPNALQDGNGHGTHVAGTVAALNNTTGVLGVAYNADLYAVKVLSASGSGTLSGIAQGIEWSISNGMNVINMSLGGSSGSTALQQACNNAYNRGIVGIAAAGNNGSSGNRNTMDYPARYSSVIAVGAVSSNNTRASFSSVGSELEVMAPGVNILSTTPGNNYASRNGTSMAAPHVAGAAALIKAKYPSMTNVQIRERLKNTATNLGDPFFYGKGVINVESALQ

SEQ ID NO: 33 - protein, 275 aa, artificial sequence
  LG12-clade protease variant
AQTVPWGIPHIKADKAHAAGVTGSGVKVAILDTGIDANHADLNVKGGASFVTGEPNALQDGNGHGTHVAGTVAALNNTTGVLGVAYNADLYAVKVLSASGSGTLSGIAQGIEWSISNGMNVINMSLGGSSGSTALQQACNNAYNRGIVGIAAAGNNGSSGNRNTMDYPARYSSVIAVGAVSENNTRASFSSVGSELEVMAPGVNILSTTPGNNYASRNGTSMAAPHVAGAAALIKAKYPSMTNVQIRERLKNTATNLGDPFFYGKGVINVESALQ

SEQ ID NO: 34 - protein, 275 aa, artificial sequence
  LG12-clade protease variant
AQTVPWGIPHIKADKAHAAGVTGSGVKVAILDTGIDANHADLNVKGGASFVSGEPNALQDGNGHGTHVAGTVAALNNTTGVLGVAYNADLYAVKVLSASGSGTLSGIAQGIEWSISNGMNVINMSLGGSSGSTALQQACNNAYNRGIVLIAAAGNHGSDGNRNTMGYPARYSSVIAVGAVSSNNQRASFSSVGSELEVMAPGVNILSTTPGNNYASFNGTSMAAPHVAGAAALIKAKYPSMTNVQIRERLKNTATNLGDPFFYGKGVINVEQALQ

SEQ ID NO: 35 - protein, 275 aa, artificial sequence
  LG12-clade protease variant
GQTVPWGIPHIKADKAHAAGVTGSGVKVAILDTGIDANHADLNVKGGASFVQGEPNALQDGNGHGTHVAGTVAALNNTTGVLGVAYNADLYAVKVLSASGSGTLSGIAQGIEWSISNGMNVINMSLGGSSGSTALQQACNNAYNRGIVGIAAAGNNGSNGNRNTMGYPARYSSVIAVGAVSENNTRASFSSVGSELEVMAPGVNILSTTPGNNYASFNGTSMAAPHVAGAAALIKAKFPSMTNVQIRERLKNTATNLGDPFFYGKGVINVEQALQ

SEQ ID NO: 36 - protein, 275 aa, artificial sequence
  LG12-clade protease variant
GQTVPWGIPHIKADKAHAAGVTGSGVKVAILDTGIDANHADLNVKGGASFVQGEPNALQDGNGHGTHVAGTVAALNNTTGVLGVAYNADLYAVKVLSASGSGTLSGIAQGIEWTISNGMNVINMSLGGSSGSTALQQACNNAYNRGIVVIAAAGNNGSNGNRNTMGYPARYSSVIAVGAVSENNTRASFSSVGSELEVMAPGVNILSTTPGNNYASFNGTSMAAPHVAGAAALIKAKFPSMTNVQIRERLKNTATNLGDPFFYGKGVINVEQALQ

SEQ ID NO: 37 - protein, 275 aa, artificial sequence
  LG12-clade protease variant
GQTVPWGIPHIKADKAHAAGVTGSGVKVAILDTGIDANHLDLNVKGGASFVSEEPNALQDGNGHGTHVAGTVAALNNTTGVLGVAYNADLYAVKVLSASKSGTLSGIAQGIEWSISEGMNVINMSLGNSSGSTALQQACNNAYNNGIVVIAAAGNSGSDGNRNTMNYPARYSSVIAVGAVSANNTRASFSSVGSELEVMAPGVNILSTTPGNNYASRNGTSLAAPHVAGAAALIKAKYPSMTNVQIRERLRNTATRLGDPFFYGKGVINVFSALQ

SEQ ID NO: 38 - protein, 275 aa, artificial sequence
  LG12-clade protease variant
AQTVPWGIPHIKADKAHAAGVTGSGVKVAILDTGIDAQHADLNVKGGASFVSEEPNALQDGNGHGTHVAGTVAALNNTTGVLGVAYNADLYAVKVLSASASGTLSGIAQGIEWSISSGMNVINMSLGGSSGSTALQQACNNAYNRGAVVIAAAGNSGTSGNRNTMDYPARYSSVIAVGAVSSNNTRASFSSVGSELEVMAPGVNILSTTPGNNYASFNGTSMAAPHVAGAAALIKAKYPSMTNVQIRERLKNTATPLGDPFFYGKGVINVEKALQ

SEQ ID NO: 39 - protein, 275 aa, artificial sequence
  LG12-clade protease variant
AQTVPWGIPHIKADKAHAAGVTGSGVKVAILDTGIDAQHADLNVKGGASFVSEEPNALQDGNGHGTHVAGTVAALNNTTGVLGVAYNADLYAVKVLSASASGTLSGIAQGIEWSISSGMNVINMSLGGSSGSTALQQACNNAYNRGAVVIAAAGNSGTSGNRNTMDYPARYSSVIAVGAVSSNNTRASFSSVGSELEVMAPGVNILSTTPGNNYASFNGTSMAAPHVAGAAALIKAKYPSMTNVQIRERLKNTATNLGDPFFYGKGVINVEKALQ

SEQ ID NO: 40 - protein, 275 aa, artificial sequence
  LG12-clade protease variant
AQTVPWGIPHIKADKAHAAGVTGSGVKVAILDTGIDAQHADLNVKGGASFVSEEPNALQDGNGHGTHVAGTVAALNNTTGVLGVAYNADLYAVKVLSASGSGTLSGIAQGIEWSISSGMNVINMSLGGSSGSTALQQACNNAYNRGAVVIAAAGNSGTSGNRNTMDYPARYSSVIAVGAVSSNNTRASFSSVGSELEVMAPGVNILSTTPGNNYASFNGTSMAAPHVAGAAALIKAKYPSMTNVQIRERLKNTATPLGDPFFYGKGVINVEKALQ

SEQ ID NO: 41 - protein, 275 aa, artificial sequence
  LG12-clade protease variant
AQTVPWGIPHIKADKAHAAGVTGTGVKVAILDTGIDANHADLNVKGGASFVSEEPNALQDGNGHGTHVAGTVAALNNTTGVLGVAYNADLYAVKVLSASGSGTLSGIAQGIEWSISNGMNVINMSLGGSSGSTALQQACNNAYNRGIVVIAAAGNSGSSGNRNTMDYPARYSSVIAVGAVSSNNTRASFSSVGSELEVMAPGVNILSTTPGNNYASFNGTSLAAPHVAGAAALIKAKYPSMTNVQIRERLKNTATPLGDPFFYGKGVINVESALQ

SEQ ID NO: 42 - protein, 275 aa, artificial sequence
  LG12-clade protease variant
AQTVPWGIPHIKADKAHAAGVTGSGVKVAILDTGIDANHADLNVKGGASFVSDEPNALQDGNGHGTHVAGTVAALDNTTGVLGVAYNADLYAVKVLSASGSGTLSGIAQGIEWSISNRMNVINMSLGGSSGSTALQQACNNAYNRGIVVIAAAGNSGSSGNRNTMDYPARYSSVIAVGAVSSNNTRASFSSVGSELEVMAPGVNILSTTPGNNYASFNGTSMAAPHVAGAAALIKAKYPSMTNVQIRERLKNTATRLGDPFFYGKGVINVESALQ

SEQ ID NO: 43 - protein, 275 aa, artificial sequence
  LG12-clade protease variant
AQTVPWGIPHIKADKAHAAGVTGSGVKVAILDTGIDANHDDLNVKGGASFVSGEPNALQDGNGHGTHVAGTVAALNNTTGVLGVAYNADLYAVKVLSASGSGTLSGIAQGIEWTISNGMNVINMSLGGSSGSTALQQACNNAYNRGAVVIAAAGNSGSNGNRNTMDYPARYSSVIAVGAVSENNTRASFSSVGSELEVMAPGVNILSTTPGNNYASFNGTSMAAPHVAGAAALIKAKYPSMTNVQIRERLKNTATNLGDPFFYGKGVINVESALQ

SEQ ID NO: 44 - protein, 14 aa, artificial sequence
  LG12-clade sequence motif
EPNALQDGNGHGTH

SEQ ID NO: 45 - protein, 275 aa, Bacillus horikoshii
AQTVPWGIPHIKADKAHASGVTGSGVKVAILDTGIDANHTDLNVKGGASFVSGEPNALQDGNGHGTHVAGTVAALNNSTGVLGVAYNADLYAVKVLSASGSGTLSGIAQGIEWSIANGMNVINMSLGGSTGSTALQQACDNAYARGIVVIAAAGNSGSRGKQNTMGYPARYSSVIAVGAVDSSNNRASFSSVGNELEVMAPGVNILSTTPGNNYASFNGTSMASPHVAGAAALIKAKYPSMTNVQIRDRLKNTATNLGDPFFYGKGVINVESALQ

SEQ ID NO: 46 - protein, 275 aa, Bacillus horikoshii
AQTVPWGIPHIKADKAHAAGVTGSGVKVAILDTGIDANHADLNVKGGASFVSGEPNALQDGNGHGTHVAGTVAALNNTTGVLGVAYNADLYAVKVLSASGSGTLSGIAQGIEWSVANGMDVINMSLGGSSGSSALQQACDNAYARGVVVIAAAGNSGSRGKQNTMGYPARYSSVIAVGAVDSSNNRASFSSVGNELEVMAPGVNILSTTPGNNYASFNGTSMASPHVAGAAALIKAKYPSMTNVQIRERLKNTATNLGDPFFYGKGVINVESALQ

SEQ ID NO: 47 - protein, 4 aa, artificial sequence
  placeholder
QQQQ

SEQ ID NO: 48 - protein, 275 aa, artificial sequence
  BPN' mutant
AQSVPYGVSQIKAPALHSQGYTGSNVKVAVIDSGIDSSHPDLKVAGGASMVPSETNPFQDNNSHGTHVAGTVAALNNSIGVLGVAPSASLYAVKVLGADGSGQYSWIINGIEWAIANNMDVINMSLGGPSGSAALKAAVDKAVASGVVVVAAAGNEGTSGSSSTVGYPGKYPSVIAVGAVDSSNQRASFSSVGPELDVMAPGVSIQSTLPGNKYGALNGTSMASPHVAGAAALILSKHPNWTNTQVRSSLENTTTKLGDSFYYGKGLINVQAAAQ

SEQ ID NO: 49 - protein, 275 aa, artificial sequence
  LG12-clade protease variant
AQTVPWGIPHIKADKAHAAGVTGSGVKVAILDTGIDANHADLNVKGGASFVSGEPNALQDGNGHGTHVAGTVAALDNTTGVLGVAYNADLYAVKVLSASGSGTLSGIAQGIEWSISNRMNVINMSLGDFYGSTALQQACNNAYNRGIVVIAAAGNSGSSGNRNTMDYPARYSSVIAVGAVSSNNTRASFSSVGSELEVMAPGVNILSTTPGNNYASFNGTSMAAPHVAGAAALIKAKYPSMTNVQIRNRLKNTATNLGDPFFYGKGVINVESALQ

SEQ ID NO: 50 - protein, 275 aa, artificial sequence
  LG12-clade protease variant
AQTVPWGIPHIKADKAHAAGVTGSGVKVAILDTGIDANHADLNVKGGASFVSGEPNALQDGNGHGTHVAGTVAALDNTTGVLGVAYNADLYAVKVLSASGSGTLSGIAQGIEWSISNRMNVINMSLGDRIGSTALQQACNNAYNRGIVVIAAAGNSGSSGNRNTMDYPARYSSVIAVGAVSSNNTRASFSSVGSELEVMAPGVNILSTTPGNNYASFNGTSMAAPHVAGAAALIKAKYPSMTNVQIRNRLKNTATNLGDPFFYGKGVINVESALQ

SEQ ID NO: 51 - protein, 275 aa, artificial sequence
  LG12-clade protease variant
AQTVPWGIPHIKADKAHAAGVTGSGVKVAILDTGIDANHADLNVKGGASFVSGEPNALQDGNGHGTHVAGTVAALDNTTGVLGVAYNADLYAVKVLSASGSGTLSGIAQGIEWSISNRMNVINMSLGVMHGSTALQQACNNAYNRGIVVIAAAGNSGSSGNRNTMDYPARYSSVIAVGAVSSNNTRASFSSVGSELEVMAPGVNILSTTPGNNYASFNGTSMAAPHVAGAAALIKAKYPSMTNVQIRNRLKNTATNLGDPFFYGKGVINVESALQ

SEQ ID NO: 52 - protein, 275 aa, artificial sequence
  LG12-clade protease variant
AQTVPWGIPHIKADKAHAAGVTGSGVKVAILDTGIDANHADLNVKGGASFVTGEPNALQDGNGHGTHVAGTVAALDNTTGVLGVAYNADLYAVKVLSASGSGTLSGIAQGIEWSISNRMNVINMSLGMVFGSTALQQACNNAYNRGIVVIAAAGNSGSSGNRNTMHYPARYSSVIAVGAVSSNNTRASFSSVGSELEVMAPGVNILSTTPGNNYASFNGTSMAAPHVAGAAALIKAKFPSMTNVQIRERLKNTATNLGDPFFYGKGVINVESALQ

SEQ ID NO: 53 - protein, 275 aa, artificial sequence
  LG12-clade protease variant
AQTVPWGIPHIKADKAHAAGVTGSGVKVAILDTGIDANHADLNVKGGASFVTGEPNALQDGNGHGTHVAGTVAALDNTTGVLGVAYNADLYAVKVLSASGSGTLSGIAQGIEWSISNRMNVINMSLGDRIGSTALQQACNNAYNRGIVVIAAAGNSGSSGNRNTMDYPARYSSVIAVGAVSSNNTRASFSSVGSELEVMAPGVNILSTTPGNNYASRNGTSMAAPHVAGAAALIKAKYPSMTNVQIRERLKNTATRLGDPFFYGKGVINVESALQ

SEQ ID NO: 54 - protein, 275 aa, artificial sequence
  LG12-clade protease variant
AQTVPWGIPHIKADKAHAAGVTGSGVKVAILDTGIDANHADLNVKGGASFVTGEPNALQDGNGHGTHVAGTVAALDNTTGVLGVAYNADLYAVKVLSASGSGTLSGIAQGIEWSISNRMNVINMSLGVMHGSTALQQACNNAYNRGIVVIAAAGNSGSSGNRNTMDYPARYSSVIAVGAVSSNNTRASFSSVGSELEVMAPGVNILSTTPGNNYASFNGTSMAAPHVAGAAALIKAKYPSMTNVQIRNRLKNTATELGDPFFYGKGVINVEKALQ

SEQ ID NO: 55 - protein, 275 aa, artificial sequence
  LG12-clade protease variant
AQTVPWGIPHIKADKAHAAGVTGSGVKVAILDTGIDANHADLNVKGGASFVFYEPNALQDGNGHGTHVAGTVAALDNTTGVLGVAYNADLYAVKVLSASGSGTLSGIAQGIEWSISNRMNVINMSLGDFYGSTALQQACNNAYNRGIVVIAAAGNSGSSGNRNTMDYPARYSSVIAVGAVSSNNTRASFSSVGSELEVMAPGVNILSTTPGNNYASRNGTSMAAPHVAGAAALIKAKYPSMTNVQIRNRLKNTATRLGDPFFYGKGVINVEKALQ

SEQ ID NO: 56 - protein, 275 aa, artificial sequence
  LG12-clade protease variant
GQTVPWGIPHIKADKAHAAGVTGSGVKVAILDTGIDANHDDLNVKGGQSFVTEEPNALQDGNGHGTHVAGTVAALNNTTGVLGVAYNADLHAVKVLSASGSGTLSGIAQGIEWTISNGMNVINMSLGGSSGSTALQQACNNAYNRGAVVIAAAGNNGSNGNRNTMHYPARYSSVIAVGAVSENNTRASFSSVGSELEVMAPGVNILSTTPGNNYASFNGTSMAAPHVAGAAALIKAKFPSMTNVQIRERLKNTATNLGDPFFYGKGVINVESALQ

SEQ ID NO: 57 - protein, 275 aa, Bacillus sp.
AQTVPWGIPHIKADKAHAAGVTGSGVKVAILDTGIDANHADLNVKGGASFVSGEPNALQDGNGHGTHVAGTVAALNNTTGVLGVAYNADLYAVKVLSASGSGTLSGIAQGIEWSVANGMNVINMSLGGSSGSSALQQACDNAYARGIVVVAAAGNSGSRGKQNTIGYPARYSSVIAVGAVDSSNNRASFSSVGNELEVMAPGVNILSTTPGNNYASFNGTSMASPHVAGAAALIKAKYPSMSNVQIRDRLKNTATNLGDPFFYGKGVINVESALQ

SEQ ID NO: 58 - protein, 275 aa, Bacillus sp.
AQTVPWGIPHIKADKAHGTGVTGSGVKVAILDTGIDANHADLNVKGGASFVSGEPNALQDGNGHGTHVAGTVAALNNTTGVLGVAYNADLYAVKVLSASGSGTLSGIAQGIEWSIANDMDVINMSLGGSSGSTTLQQACDNAYASGIVVIAAAGNSGSKGKRNTIGYPAKYNSVIAVGAVDSSNNRASFSSVGSELEVMAPGVNILSTTPGNKYSSFNGTSMASPHVAGAAALIIAKYPNMTNVQIRERLKNTATNLGDPFFFGKGVINVESALQ

SEQ ID NO: 59 - protein, 275 aa, artificial sequence
  LG12-clade protease variant
AQTVPWGIPHIKADKAHAAGVTGSGVKVAILDTGIDANHADLNVKGGASFVAGEPNALQDGNGHGTHVAGTVAALDNSIGVLGVAPNVSLYAVKVLGASGSGSVSSIAQGLEWAGNNGMHVANLSLGSPSPSATLEQAVNSATSRGVLVVAAAGNSGTSGNRNTMDYPARYSSVIAVGAVSSNNTRASFSSVGSELEVMAPGVNILSTTPGNNYASLNGTSMATPHVAGAAALIKAKYPSMTNVQIRNRLKNTATNLGDPFFYGKGVINVESALQ

SEQ ID NO: 60 - protein, 275 aa, artificial sequence
  LG12-clade protease variant
TQTVPWGIPHIKADKAHAAGVTGSGVKVAILDTGIDANHADLNVKGGASFVSGEPNALQDGNGHGTHVAGTVAALDNSIGVLGVAPNAELYAVKVLGASGSGSVSSIAQGLEWAGNNGMHVANLSLGSPSPSATLEQAVNSATSRGVLVVAAAGNSGTSGNRNTMDYPARYSSVIAVGAVSSNNTRASFSSVGSELEVMAPGVNILSTYPGSTYATLNGTSMAAPHVAGAAALIKAKYPSMTNVQIRNRLKNTATNLGDPFFYGKGVINVESALQ

SEQ ID NO: 61 - protein, 275 aa, artificial sequence
  LG12-clade protease variant
AQTVPWGIPHIKADKAHAAGVTGSGVKVAILDTGIDANHADLNVKGGASFVAGEPNALQDGNGHGTHVAGTVAALDNTTGVLGVAPSVSLYAVKVLGASGSGSVSSIAQGLEWAGNNGMHVANLSLGSPSPSATLEQAVNSATSRGVLVVAAAGNSGTSGNRNTMDYPARYSSVIAVGAVSSNNTRASFSSVGSELEVMAPGVNILSTYPGSTYATLNGTSMATPHVAGAAALIKAKYPSMTNVQIRNRLKNTATNLGDPFFYGKGVINVESALQ

SEQ ID NO: 62 - protein, 275 aa, artificial sequence
  LG12-clade protease variant
TQTVPWGIPHIKADKAHAAGVTGSGVKVAILDTGIDANHADLNVKGGASFVSGEPNALQDGNGHGTHVAGTVAALDNTTGVLGVAPSVSLYAVKVLGASGSGSVSSIAQGLEWAGNNGMHVANLSLGSPSPSATLEQAVNSATSRGVLVVAASGNSGTSGNRNTMDYPARYSSVIAVGAVSSNNTRASFSSVGSELEVMAPGVNILSTYPGSTYATLNGTSMATPHVAGAAALIKAKYPSMTNVQIRNRLKNTATNLGDPFFYGKGVINVESALQ

SEQ ID NO: 63 - protein, 275 aa, artificial sequence
  LG12-clade protease variant
TQTVPWGIPHIKADKAHAAGVTGSGVKVAILDTGIDANHADLNVKGGASFVSGEPNALQDGNGHGTHVAGTVAALDNTTGVLGVAPSVSLYAVKVLGASGSGSVSSIAQGLEWAGNNGMHVANLSLGSPSPSATLEQAVNSATSRGVLVVAAAGNSGTSGNRNTMDYPARYSSVIAVGAVSSNNTRASFSSVGSELEVMAPGVNILSTYPGSTYATLNGTSMATPHVAGAAALIKAKYPSMTNVQIRNRLKNTATNLGDPFFYGKGVINVESALH

SEQ ID NO: 64 - protein, 275 aa, artificial sequence
  LG12-clade protease variant
TQTVPWGIPHIKADKAHAAGVTGSGVKVAILDTGIDANHADLNVKGGASFVAGEPNALQDGNGHGTHVAGTVAALDNTTGVLGVAPSVSLYAVKVLGASGSGSVSSIAQGLEWAGNNGMHVANLSLGSPSPSATLEQAVNSATSRGVLVVAASGNSGTSGNRNTMDYPARYSSVIAVGAVSSNNTRASFSSVGSELEVMAPGVNILSTYPGSTYATLNGTSMATPHVAGAAALIKAKYPSMTNVQIRNRLKNTATNLGDPFFYGKGVINVESALQ

SEQ ID NO: 65 - protein, 275 aa, artificial sequence
  LG12-clade protease variant
TQTVPWGIPHIKADKAHAAGVTGSGVKVAILDTGIDANHADLNVKGGASFVSGEPNALQDGNGHGTHVAGTVAALDNSIGVLGVAPSVSLYAVKVLGASGSGSVSSIAQGLEWAGNNGMHVANLSLGSPSPSATLEQAVNSATSRGVLVVAAAGNSGTSGNRNTMDYPARYSSVIAVGAVSSNNTRASFSSVGSELEVMAPGVNILSTYPGSTYATLNGTSMATPHVAGAAALIKAKYPSMTNVQIRNRLKNTATNLGDPFFYGKGVINVESALQ

SEQ ID NO: 66 - protein, 275 aa, Bacillus sp.
AQTVPWGIPHIKADKAHASGVTGSGVKVAVLDTGIDANHADLNVKGGASFVSGEPNALQDGNGHGTHVAGTVAALNNTTGVLGVAYNADLYAVKVLSASGSGTLSGIAQGIEWSIANDMDVINMSLGGSTGSTALQQACDNAYASGIVVVAAAGNSGSKGKRNTMGYPARYSSVIAVGAVDSSNNRASFSSVGSELEVMAPGVSILSTTPGNNYSSFNGTSMASPHVAGAAALIKAKYPSMTNVQIREKLKNTATNLGDAFYYGHGVINVESALQ

SEQ ID NO: 67 - protein, 275 aa, artificial sequence
  LG12-clade protease variant
GQTVPWGIPHIKADKAHAAGVTGRGVKVAVLDTGIDANHADLNVKGGQSFVQNEPNALQDGNGHGTHVAGTVAALNNTTGVLGVAYNADLYAVKVLSASGSGTLSGIAQGIEWTISNGMNVINMSLGNSSGSTALQQACNNAYNRGIVNIAAAGNSGSSGNRNTMGYPARYSSVIAVGAVSSNNTRASFSSVGSELEVMAPGVNILSTTPGNNYASRNGTSMAAPHVSGAAALIKNKYPSMTNVQIRERLKNTATNLGDPFFYGKGVINVEKALQ

SEQ ID NO: 68 - protein, 275 aa, artificial sequence
  LG12-clade protease variant
GQTVPWGIPHIKADKAHAAGVTGSGVKVAILDTGIDANHADLNVKGGASFVNGEPNALQDGNGHGTHVAGTVAALNNTTGVLGVAYNADPYAVKVLSASGSGTLSGIAQGIEWSISSGMNVINMSLGGSSGSTALQQACNNAYNRGIVGIAAAGNSGSEGNRNTMGYPARYSSVIAVGAVSSNNTRASFSSVGSELEVMAPGVNILSTTPGNNYASFNGTSMAAPHVAGAAALIKAKFPSMTNVQIRERLKNTATNLGDPFFYGKGVINVENALQ

SEQ ID NO: 69 - protein, 275 aa, artificial sequence
  LG12-clade protease variant
AQVVPWGIVHIKADKAHARGVTGTGVKVAVLDTGIDANHLDLNVKGGASFVSGEPNPLQDGNGHGTHVAGTVAALDNTTGVLGVAYNADLYAVKVLSASGTGTLSGVAQGIEWSIENGMNVINMSLGGSSGSTALQQACNNAYNRGAVVIAAAGNAGSSGNRNTMYYPARYSSVIAVGAVSSNNQRASFSSVGPELEVMAPGVNILSTTPGNNYESFNGTSMAAPHVAGAAALIKAKYPFMTNVQIRERLKNTATKLGDPFFYGKGVINVEKALQ

SEQ ID NO: 70 - protein, 275 aa, artificial sequence
  LG12-clade protease variant
GQTVPWGIPHIKADKAHAAGVTGSGVKVAILDTGIDANHADLNVKGGQSFVTGEPNALQDGNGHGTHVAGTVAALNNGTGVLGVAYNADLHAVKVLSASGSGTLSGIAQGIEWTISSGMNVINMSLGGSSGSTALQQACNNAYNRGAVVIAAAGNNGSNGNRNTMHYPARYSSVIAVGAVSSNNTRASFSSVGSELEVMAPGVNILSTTPGNNYASRNGTSLAAPHVAGAAALIKNKFPSMTNVNIRERLKNTATNLGDPFFYGKGNINVESALQ

SEQ ID NO: 71 - protein, 275 aa, artificial sequence
  LG12-clade protease variant
GQTVPWGIPHIKADKAHAAGVTGSGVTVAILDTGIDAQHLDLSVKGGASFVQDEPNALQDGNGHGTHVAGTVAALNNTTGVLGVAYNADLYAVKVLSASKSGTLSGIAQGIEWSISNGMNVINMSLGNSSGSTALQQACNNAYNNGIVNIAAAGNSGSDGNRNTMGYPARYSSVIAVGAVASNNTRASFSSVGSELEVMAPGVNILSTTPGNNYASRNGTSMAAPHVAGAAALIKAKYPSMTNVQIRERLRNTATRLGDPFFYGKGVINVWQALQ

SEQ ID NO: 72 - protein, 275 aa, artificial sequence
  LG12-clade protease variant
GQTVPWGITHIKADKAHARGVTGSGVKVAILDTGIDAAHADLNVKGGASFVSGEPNPLQDGNGHGTHVAGTAAALDNTTGVLGVAYNADLYAVKVLSALGSGELSGIAQGIEWTISNGMNVINMSLGGSSGSTALQQACNNAYNWGIVSIAAAGNNGSSGNRNTMHYPARYSSVIAVGAVSSNNQRASFSSVGPELEVMAPGVNILSTTPGNNYASRNGTSMAAPHVAGAAALIKAKFPSMTNVQIRERLKNTATNLGDPFFYGSGVINVEKALQ

SEQ ID NO: 73 - protein, 275 aa, artificial sequence
  LG12-clade protease variant
AQTVPWGIPHIKADKAHAAGVTGSGVKVAILDTGIDANHADLNVKGGASFVSGEPNALQDGNGHGTHVAGTVAALNNTTGVLGVAYNADLYAVKVLSASGSGTLSGIAQGIEWSISNGMNVIDMSLGGSSGSTALQQACNNAYNRGIVVIAAAGNSGSDGNRNTMGYPARYSSVIAVGAVSSNNTRASFSSVGSELEVMAPGVNILSTFPGNNYASFNGTSLAAPHVAGAAALIKAKYPSMTNVQIRERLKNTATNLGDPFFYGKGNINVESALQ

SEQ ID NO: 74 - protein, 275 aa, artificial sequence
  LG12-clade protease variant
GQTVPWGIIHIKADKAHARGVTGTGVTVAVLDTGIDAQHADLHVKGGQSFVSDEPNALQDGNGHGTHVAGTVAALNNTTGVLGVAYNADLYAVKVLSASGTGTLSGTAQGIEWSISNGMNVINMSLGNSSGSDALQQACNNAYNRGIVSIAAAGNSGSSGNRNTMGYPARYSSVIAVGAVSSNNQRASFSSVGSELEVMAPGVNILSTTPGNNYASFNGTSMAAPHVSGAAALIKAKYPSMSNVQIRERLRNTATNLGDPFFYGKGVINVEKALQ

SEQ ID NO: 75 - protein, 275 aa, artificial sequence
  LG12-clade protease variant
AQTVPWGIPHIKADKAHAAGVTGSGVKVAILDTGIDANHADLNVQGGASFVSGEPNALQDGNGHGTHVAGTVAALNNTTGVLGVAYNADLYAVKVLSASGSGTLSGIAQGIEWSISNGMNVIDMSLGGSSGSTALQQACNNAYNRGIVVIAAAGNNGSSGNRNTMGYPARYSSVIAVGAVSSNNTRASFSSVGSELEVMAPGVNILSTFPGNNYASFNGTSMAAPHVAGAAALIKAKYPSMTNVQIRERLKNTATPLGDPFFYGKGVINVESALQ

SEQ ID NO: 76 - protein, 275 aa, artificial sequence
  LG12-clade protease variant
GQTVPWGIPHIKADKAHAAGVTGSGVKVAILDTGIDANHADLNVKGGQSFVTGEPNALQDGNGHGTHVAGTVAALNNGTGVLGVAYNADLHAVKVLSASGSGTLSGIAQGIEWTISSGMNVINMSLGGSSGSTALQQACNNAYNRGAVVIAAAGNNGSNGNRNTMHYPARYSSVIAVGAVSSNNTRASFSSVGSELEVMAPGVNILSTTPGNNYASFNGTSLAAPHVAGAAALIKNKFPSMTNVNIRERLKNTATNLGDPFFYGKGNINVESALQ

SEQ ID NO: 77 - protein, 275 aa, artificial sequence
  LG12-clade protease variant
GQTVPWGIPHIKADKAHAAGVTGSGVKVAVLDTGIDANHADLNVKGGASFVQNEPNALQDGNGHGTHVAGTVAALNNTTGVLGVAYNADLYAVKVLSASGSGTLSGIAQGIEWTISNGMNVINMSLGNSSGSTALQQACNNAYNRGIVNIAAAGNSGSNGNRNTMGYPARYSSVIAVGAVSSNNTRASFSSVGSELEVMAPGVNILSTTPGNNYASRNGTSMAAPHVSGAAALIKNKYPSMTNVQIRERLKNTATNLGDPFFYGKGVINVESALQ

SEQ ID NO: 78 - protein, 275 aa, artificial sequence
  LG12-clade protease variant
GQTVPWGIPHIKADKAHAAGVTGSGVKVAILDTGIDANHADLNVKGGQSFVTGEPNALQDGNGHGTHVAGTVAALNNGTGVLGVAYNADLHAVKVLSASGSGTLSGIAQGIEWTISSGMNVINMSLGGSSGSTALQQACNNAYNRGAVVIAAAGNNGSNGNRNTMHYPARYSSVIAVGAVSSNNTRASFSSVGSELEVMAPGVNILSTTPGNNYASFNGTSLAAPHVAGAAALIKNKFPSMTNVNIRERLKNTATELGDPFFYGKGNINVESALQ

SEQ ID NO: 79 - protein, 275 aa, artificial sequence
  LG12-clade protease variant
GQTVPWGIPHIKADKAHAAGVTGSGVKVAVLDTGIDANHEDLDVKGGQSFVQNEPNALQDGNGHGTHVAGTVAALNNTTGVLGVAYNADLYAVKVLSASGSGTLSGIAQGIEWTISNGMNVINMSLGNSSGSTALQQACNNAYNRGIVNVAAAGNNGSDGNRNTMNYPARYSSVIAVGAVASNNTRASFSSVGSELEVMAPGVNILSTTPGNNYATFNGTSLAAPHVSGAAALIKNKYPSMTNVQIRERLKNTATNLGDPFFYGKGVINVESALQ

SEQ ID NO: 80 - protein, 275 aa, artificial sequence
  LG12-clade protease variant
GQEVPWGIPHIKADKAHAAGVTGSGVKVAILDTGIDANHDDLNVKGGQSFVTEEPNALQDGNGHGTHVAGTVAALNNGTGVLGVAYNADLHAVKVLSASGSGTLSGIAQGIEWTISSGMNVINMSLGGSSGSTALQQACNNAYNRGAVVIAAAGNNGSDGNRNTMHYPARYSSVIAVGAVSENNTRASFSSVGSELEVMAPGVNILSTTPGNNYDSRNGTSLAAPHVAGAAALIKNKFPSMTNVNIRERLKNTATELGDPFFYGKGNINVESALQ

SEQ ID NO: 81 - protein, 275 aa, artificial sequence
  LG12-clade protease variant
GQTVPWGIPHIKADKAHAAGVTGRGVKVAVLDTGIDANHADLNVKGGQSFVQNEPNALQDGNGHGTHVAGTVAALNNTTGVLGVAYNADLYAVKVLSASGSGTLSGIAQGIEWTISNGMNVINMSLGNSSGSTALQQACNNAYNRGIVNIAAAGNSGSDGNRNTMGYPARYSSVIAVGAVSSNNTRASFSSVGSELEVMAPGVNILSTTPGNNYASRNGTSMAAPHVSGAAALIKNKYPSMTNVQIRERLKNTATNLGDPFFYGKGVINVEKALQ

SEQ ID NO: 82 - protein, 275 aa, artificial sequence
  LG12-clade protease variant
GQTVPWGIPHIKADKAHAAGVTGSGVSVAILDTGIDATHADLNVKGGASFVSEEPNALQDGNGHGTHVAGTVAALNNDTGVLGVAYNADPYATKVLSASGSGELSGIAQGIEWSISNGMNVINMSLGGSSGSTALQQACNNAYNRGIVVIAAAGNSGSDGNRNTMSYPARYSSVIAVGAVSSNNQRASFSSVGSELEVMAPGVNILSTTPGNNYASRNGTSMAAPHVAGAAALIKNKYPSMTNVQIRERLKNTATNLGDPFFYGKGVINVESALQ

SEQ ID NO: 83 - protein, 275 aa, artificial sequence
  LG12-clade protease variant
GQTVPWGIPHIKADKAHAAGVTGSGVTVAILDTGIDANHLDLSVKGGASFVQDEPNALQDGNGHGTHVAGTVAALNNTTGVLGVAYNADLYAVKVLSASGSGTLSGIAQGIEWSISNGMNVINMSLGGSSGSTALQQACNNAYNRGIVNIAAAGNSGSDGNRNTMYYPARYSSVIAVGAVASNNTRASFSSVGSELEVMAPGVNILSTTPGNNYASRNGTSLAAPHVAGAAALIKAKYPSMTNVQIRERLKNTATRLGDPFFYGKGVINVWQALQ

SEQ ID NO: 84 - protein, 275 aa, artificial sequence
  LG12-clade protease variant
AQVVPWGIPHIKADKAHAAGVTGSGVKVAILDTGIDANHADLLVKGGASFVSEEPNPLQDGNGHGTHVAGTAAALDNTTGVLGVAYNADLYAVKVLSASGTGTLSGTAQGIEWSIENGMNVINMSLGGSSGSTALQQACNNAYNRGAVVIAAAGNSGSQGNRNTMAYPARYSSVIAVGAVSSNNTRAYFSSVGPELEVMAPGVNILSTTPGNNYASRNGTSMAAPHVAGAAALIKQKYPFMTNVQVRERLKNTATNLGDPFFYGKGVINVEQALQ

SEQ ID NO: 85 - protein, 275 aa, artificial sequence
  LG12-clade protease variant
GQEVPWGIPHIKADKAHAAGVTGSGVKVAILDTGIDANHDDLNVKGGESFVTEEPNALQDGNGHGTHVAGTVAALNNGTGVLGVAYNADLHAVKVLSASGSGTLSGIAQGIEWTISSGMNVINMSLGGSSGSTALQQACNNAYNRGAVVIAAAGNNGSDGNRNTMHYPARYSSVIAVGAVSENNTRASFSSVGSELEVMAPGVNILSTTPGNNYDSFNGTSLAAPHVAGAAALIKNKFPSMTNVNIRERLKNTATELGDPFFYGKGNINVESALQ

SEQ ID NO: 86 - protein, 275 aa, artificial sequence
  LG12-clade protease variant
GQTVPWGIPHIKADKAHAAGVTGSGVTVAILDTGIDAQHLDLSVKGGASFVQDEPNALQDGNGHGTHVAGTVAALNNTTGVLGVAYNADLYAVKVLSASGSGTLSGIAQGIEWSISEGMNVINMSLGGSSGSTALQQACNNAYNNGIVNIAAAGNSGSDGNRNTMYYPARYSSVIAVGAVASNNTRASFSSVGSELEVMAPGVNILSTTPGNNYASRNGTSLAAPHVAGAAALIKAKYPSMTNVQIRERLRNTATRLGDPFFYGKGVINVWQALQ

SEQ ID NO: 87 - protein, 275 aa, artificial sequence
  LG12-clade protease variant
GQTVPWGIPHIKADKAHAAGVTGSGVKVAILDTGIDANHDDLNVKGGASFVTGEPNALQDGNGHGTHVAGTVAALNNGTGVLGVAYNADLHAVKVLSASGSGTLSGIAQGIEWTISSGMNVINMSLGGSSGSTALQQACNNAYNRGAVVIAAAGNNGSNGNRNTMHYPARYSSVIAVGAVSENNTRASFSSVGSELEVMAPGVNILSTTPGNNYASFNGTSLAAPHVAGAAALIKNKFPSMTNVNIRERLKNTATNLGDPFFYGKGNINVESALQ

SEQ ID NO: 88 - protein, 275 aa, artificial sequence
  LG12-clade protease variant
GQTVPWGIPHIKADKAHAAGVTGSGVKVAILDTGIDANHADLNVKGGQSFVQNEPNALQDGNGHGTHVAGTVAALNNTTGVLGVAYNADLYAVKVLSASGSGTLSGIAQGIEWTISNGMNVINMSLGNSSGSTALQQACNNAYNRGIVVIAAAGNSGSNGNRNTMGYPARYSSVIAVGAVSSNNTRASFSSVGSELEVMAPGVNILSTTPGNNYATFNGTSMAAPHVSGAAALIKAKYPSMTNVQIRERLKNTATNLGDPFFYGKGVINVESALQ

SEQ ID NO: 89 - protein, 275 aa, artificial sequence
  LG12-clade protease variant
GQTVPWGITHIKADKAHAAGVTGTGVSVAILDTGIDANHADLNVKGGASFVSGEPNPLQDGNGHGTHVAGTAAALDNTTGVLGVAYNADLYAVKVLSASGTGTLSGIAQGIEWSIENGMNVINMSLGGSSGSTALQQACYNAYNRGIVNIAAAGNSGSNGNRNTMNYPARYSSVIAVGAVSSNNQRAYFSSVGPELEVMAPGVNILSTTPGNNYASFNGTSMAAPHVAGAAALVKAKYPFMTNVQIRERLRNTATNLGDPFFYGKGVINVFSALQ

SEQ ID NO: 90 - protein, 275 aa, artificial sequence
  LG12-clade protease variant
GQTVPWGIPHIKADKAHAAGVTGSGVKVAVLDTGIDANHADLDVKGGQSFVQNEPNALQDGNGHGTHVAGTVAALNNTTGVLGVAYNADLYAVKVLSASGSGTLSGIAQGIEWTISNGMNVINMSLGNSSGSTALQQACNNAYNRGIVNIAAAGNSGSNGNRNTMGYPARYSSVIAVGAVSSNNTRASFSSVGSELEVMAPGVNILSTTPGNNYATFNGTSMAAPHVSGAAALIKNKYPSMTNVQIRERLKNTATNLGDPFFYGKGVINVESALQ

SEQ ID NO: 91 - protein, 275 aa, artificial sequence
  LG12-clade protease variant
GQTVPWGIPHIKADKAHAAGVTGSGVKVAVLDTGIDANHVDLNVKGGASFVSGEPNALQDGNGHGTHVAGTVAALDNDTGVLGVAYNADLYAVKVLSASGSGELSGIAQGIEWSISNGMNVINMSLGGSSGSTALQQACNNAYNRGIVVIAAAGNSGSSGNRNTMSYPARYSSVIAVGAVSSNNQRASFSSVGSELEVMAPGVNILSTTPGNNYASRNGTSMAAPHVAGAAALIKAKYPSMTNVQIRERLKNTATNLGDPFFYGKGVINVESALQ

SEQ ID NO: 92 - protein, 275 aa, artificial sequence
  LG12-clade protease variant
GQTVPWGIPHIKADKAHAAGVTGSGVSVAILDTGIDANHVDLNVKGGASFVSNEPNALQDGNGHGTHVAGTVAALNNDTGVLGVAYNADPYAVKVLSASGSGELSGIAQGIEWSISNGMNVINMSLGGSSGSTALQQACNNAYNRGIVVIAAAGNNGSDGNRNTMSYPARYSSVIAVGAVSSNNTRASFSSVGSELEVMAPGVNILSTTPGNNYASRNGTSMAAPHVAGAAALIKAKYPSMTNVQIRERLKNTATNLGDPFFYGKGVINVESALQ

SEQ ID NO: 93 - protein, 275 aa, artificial sequence
  LG12-clade protease variant
AQTVPWGIPHIKADKAHAAGVTGSGVKVAILDTGIDAQHADLNVKGGASFVSGEPNALQDGNGHGTHVAGTVAALNNTTGVLGVAYNADLYAVKVLSASASGTLSGIAQGIEWSISSGMNVINMSLGGSSGSTALQQACNNAYNRGAVVIAAAGNSGTSGNRNTMDYPARYSSVIAVGAVSSNNTRASFSSVGSELEVMAPGVNILSTTPGNNYASFNGTSMAAPHVAGAAALIKAKYPSMTNVQIRERLKNTATPLGDPFFYGKGVINVEKALQ

SEQ ID NO: 94 - protein, 275 aa, artificial sequence
  LG12-clade protease variant
GQTVPWGIPHIKADKAHAAGVTGSGVKVAVLDTGIDANHADLNVKGGQSFVQNEPNALQDGNGHGTHVAGTVAALNNTTGVLGVAYNADLYAVKVLSASGSGTLSGIAQGIEWTISNGMNVINMSLGNSSGSTALQQACNNAYNRGIVNVAAAGNNGSNGNRNTMGYPARYSSVIAVGAVASNNTRASFSSVGSELEVMAPGVNILSTTPGNNYATFNGTSLAAPHVSGAAALIKNKYPSMTNVQIRERLKNTATNLGDPFFYGKGVINVESALQ

SEQ ID NO: 95 - protein, 275 aa, artificial sequence
  LG12-clade protease variant
AQTVPWGIPHIKADKAHAAGVTGSGVKVAILDTGIDAQHADLNVKGGASFVSGEPNALQDGNGHGTHVAGTVAALNNTTGVLGVAYNADLYAVKVLSASASGTLSGIAQGIEWSISSGMNVINMSLGGSSGSTALQQACNNAYNRGAVVIAAAGNSGTSGNRNTMGYPARYSSVIAVGAVSSNNTRASFSSVGSELEVMAPGVNILSTTPGNNYASFNGTSMAAPHVAGAAALIKAKYPSMTNVQIRERLKNTATPLGDPFFYGKGVINVEKALQ

SEQ ID NO: 96 - protein, 275 aa, artificial sequence
  LG12-clade protease variant
GQTVPWGIPHIKADKAHAAGVTGSGVKVAVLDTGIDANHADLDVKGGESFVQNEPNALQDGNGHGTHVAGTVAALNNTTGVLGVAYNADLYAVKVLSASGSGTLSGIAQGIEWTISNGMNVINMSLGNSSGSTALQQACNNAYNRGIVNIAAAGNSGSDGNRNTMGYPARYSSVIAVGAVSSNNTRASFSSVGSELEVMAPGVNILSTTPGNNYATFNGTSMAAPHVSGAAALIKNKYPSMTNVQIRERLKNTATNLGDPFFYGKGVINVESALQ

SEQ ID NO: 97 - protein, 275 aa, artificial sequence
  LG12-clade protease variant
GQTVPWGIPHIKADKAHAAGVTGSGVTVAILDTGIDAQHLDLSVKGGASFVQDEPNALQDGNGHGTHVAGTVAALNNTTGVLGVAYNADLYAVKVLSASGSGTLSGIAQGIEWSISEGMNVINMSLGGSSGSTALQQACNNAYNNGIVNIAAAGNSGSDGNRNTMYYPARYSSVIAVGAVASNNTRASFSSVGSELEVMAPGVNILSTTPGNNYASRNGTSLAAPHVAGAAALIKAKYPSMTNVQIRERLRNTATRLGDPFFYGKGVINVWSALQ

SEQ ID NO: 98 - protein, 275 aa, artificial sequence
  LG12-clade protease variant
AQTVPWGIPHIKADKAHAAGVTGRGVKVAVLDTGIDANHEDLDVKGGESFVQNEPNALQDGNGHGTHVAGTVAALNNTTGVLGVAYNADLYAVKVLSASGSGTLSGIAQGIEWTISNGMNVINMSLGNSSGSTALQQACNNAYNRGIVNVAAAGNNGSDGNRNTMDYPARYSSVIAVGAVASNNTRASFSSVGSELEVMAPGVNILSTTPGNNYATRNGTSMAAPHVSGAAALIKNKYPSMTNVQIRERLKNTATNLGDPFFYGKGVINVWKALQ

SEQ ID NO: 99 - protein, 275 aa, artificial sequence
  LG12-clade protease variant
AQTVPWGIPHIKADKAHAAGVTGSGVKVAILDTGIDANHADLNVKGGASFVSGEPNALQDGNGHGTHVAGTVAALDNTTGVLGVAYNADLYAVKVLSASGSGTLSGIAQGIEWSISNRMNVINMSLGAMTGSTALQQACNNAYNRGIVVIAAAGNSGSSGNRNTMDYPARYSSVIAVGAVSSNNTRASFSSVGSELEVMAPGVNILSTTPGNNYASFNGTSMAAPHVAGAAALIKAKYPSMTNVQIRNRLKNTATNLGDPFFYGKGVINVESALQ

SEQ ID NO: 100 - protein, 275 aa, artificial sequence
  LG12-clade protease variant
AQTVPWGIPHIKADKAHAAGVTGSGVKVAILDTGIDANHADLNVKGGASFVSGEPNALQDGNGHGTHVAGTVAALDNTTGVLGVAYNADLYAVKVLSASGSGTLSGIAQGIEWSISNRMNVINMSLGDELGSTALQQACNNAYNRGIVVIAAAGNSGSSGNRNTMDYPARYSSVIAVGAVSSNNTRASFSSVGSELEVMAPGVNILSTTPGNNYASFNGTSMAAPHVAGAAALIKAKYPSMTNVQIRNRLKNTATNLGDPFFYGKGVINVESALQ

SEQ ID NO: 101 - protein, 275 aa, artificial sequence
  LG12-clade protease variant
AQTVPWGIPHIKADKAHAAGVTGSGVKVAILDTGIDANHADLNVKGGASFVSGEPNALQDGNGHGTHVAGTVAALDNTTGVLGVAYNADLYAVKVLSASGSGTLSGIAQGIEWSISNRMNVINMSLGDKHGSTALQQACNNAYNRGIVVIAAAGNSGSSGNRNTMDYPARYSSVIAVGAVSSNNTRASFSSVGSELEVMAPGVNILSTTPGNNYASFNGTSMAAPHVAGAAALIKAKYPSMTNVQIRNRLKNTATNLGDPFFYGKGVINVESALQ

SEQ ID NO: 102 - protein, 275 aa, artificial sequence
  LG12-clade protease variant
AQTVPWGIPHIKADKAHAAGVTGSGVKVAILDTGIDANHADLNVKGGASFVSGEPNALQDGNGHGTHVAGTVAALDNTTGVLGVAYNADLYAVKVLSASGSGTLSGIAQGIEWSISNRMNVINMSLGDMHGSTALQQACNNAYNRGIVVIAAAGNSGSSGNRNTMDYPARYSSVIAVGAVSSNNTRASFSSVGSELEVMAPGVNILSTTPGNNYASFNGTSMAAPHVAGAAALIKAKYPSMTNVQIRNRLKNTATNLGDPFFYGKGVINVESALQ

SEQ ID NO: 103 - protein, 275 aa, artificial sequence
  LG12-clade protease variant
AQTVPWGIPHIKADKAHAAGVTGSGVKVAILDTGIDANHADLNVKGGASFVSGEPNALQDGNGHGTHVAGTVAALDNTTGVLGVAYNADLYAVKVLSASGSGTLSGIAQGIEWSISNRMNVINMSLGDNMGSTALQQACNNAYNRGIVVIAAAGNSGSSGNRNTMDYPARYSSVIAVGAVSSNNTRASFSSVGSELEVMAPGVNILSTTPGNNYASFNGTSMAAPHVAGAAALIKAKYPSMTNVQIRNRLKNTATNLGDPFFYGKGVINVESALQ

SEQ ID NO: 104 - protein, 275 aa, artificial sequence
  LG12-clade protease variant
AQTVPWGIPHIKADKAHAAGVTGSGVKVAILDTGIDANHADLNVKGGASFVSGEPNALQDGNGHGTHVAGTVAALDNTTGVLGVAYNADLYAVKVLSASGSGTLSGIAQGIEWSISNRMNVINMSLGDNYGSTALQQACNNAYNRGIVVIAAAGNSGSSGNRNTMDYPARYSSVIAVGAVSSNNTRASFSSVGSELEVMAPGVNILSTTPGNNYASFNGTSMAAPHVAGAAALIKAKYPSMTNVQIRNRLKNTATNLGDPFFYGKGVINVESALQ

SEQ ID NO: 105 - protein, 275 aa, artificial sequence
  LG12-clade protease variant
AQTVPWGIPHIKADKAHAAGVTGSGVKVAILDTGIDANHADLNVKGGASFVSGEPNALQDGNGHGTHVAGTVAALDNTTGVLGVAYNADLYAVKVLSASGSGTLSGIAQGIEWSISNRMNVINMSLGDPFGSTALQQACNNAYNRGIVVIAAAGNSGSSGNRNTMDYPARYSSVIAVGAVSSNNTRASFSSVGSELEVMAPGVNILSTTPGNNYASFNGTSMAAPHVAGAAALIKAKYPSMTNVQIRNRLKNTATNLGDPFFYGKGVINVESALQ

SEQ ID NO: 106 - protein, 275 aa, artificial sequence
  LG12-clade protease variant
AQTVPWGIPHIKADKAHAAGVTGSGVKVAILDTGIDANHADLNVKGGASFVSGEPNALQDGNGHGTHVAGTVAALDNTTGVLGVAYNADLYAVKVLSASGSGTLSGIAQGIEWSISNRMNVINMSLGDPYGSTALQQACNNAYNRGIVVIAAAGNSGSSGNRNTMDYPARYSSVIAVGAVSSNNTRASFSSVGSELEVMAPGVNILSTTPGNNYASFNGTSMAAPHVAGAAALIKAKYPSMTNVQIRNRLKNTATNLGDPFFYGKGVINVESALQ

SEQ ID NO: 107 - protein, 275 aa, artificial sequence
  LG12-clade protease variant
AQTVPWGIPHIKADKAHAAGVTGSGVKVAILDTGIDANHADLNVKGGASFVSGEPNALQDGNGHGTHVAGTVAALDNTTGVLGVAYNADLYAVKVLSASGSGTLSGIAQGIEWSISNRMNVINMSLGDRTGSTALQQACNNAYNRGIVVIAAAGNSGSSGNRNTMDYPARYSSVIAVGAVSSNNTRASFSSVGSELEVMAPGVNILSTTPGNNYASFNGTSMAAPHVAGAAALIKAKYPSMTNVQIRNRLKNTATNLGDPFFYGKGVINVESALQ

SEQ ID NO: 108 - protein, 275 aa, artificial sequence
  LG12-clade protease variant
AQTVPWGIPHIKADKAHAAGVTGSGVKVAILDTGIDANHADLNVKGGASFVSGEPNALQDGNGHGTHVAGTVAALDNTTGVLGVAYNADLYAVKVLSASGSGTLSGIAQGIEWSISNRMNVINMSLGDSNGSTALQQACNNAYNRGIVVIAAAGNSGSSDNRNTMDYPARYSSVIAVGAVSSNNTRASFSSVGSELEVMAPGVNILSTTPGNNYASFNGTSMAAPHVAGAAALIKAKYPSMTNVQIRNRLKNTATNLGDPFFYGKGVINVESALQ

SEQ ID NO: 109 - protein, 275 aa, artificial sequence
  LG12-clade protease variant
AQTVPWGIPHIKADKAHAAGVTGSGVKVAILDTGIDANHADLNVKGGASFVSGEPNALQDGNGHGTHVAGTVAALDNTTGVLGVAYNADLYAVKVLSASGSGTLSGIAQGIEWSISNRMNVINMSLGDTFGSTALQQACNNAYNRGIVVIAAAGNSGSSGNRNTMDYPARYSSVIAVGAVSSNNTRASFSSVGSELEVMAPGVNILSTTPGNNYASFNGTSMAAPHVAGAAALIKAKYPSMTNVQIRNRLKNTATNLGDPFFYGKGVINVESALQ

SEQ ID NO: 110 - protein, 275 aa, artificial sequence
  LG12-clade protease variant
AQTVPWGIPHIKADKAHAAGVTGSGVKVAILDTGIDANHADLNVKGGASFVSGEPNALQDGNGHGTHVAGTVAALDNTTGVLGVAYNADLYAVKVLSASGSGTLSGIAQGIEWSISNRMNVINMSLGDYRGSTALQQACNNAYNRGIVVIAAAGNSGSSGNRNTMDYPARYSSVIAVGAVSSNNTRASFSSVGSELEVMAPGVNILSTTPGNNYASFNGTSMAAPHVAGAAALIKAKYPSMTNVQIRNRLKNTATNLGDPFFYGKGVINVESALQ

SEQ ID NO: 111 - protein, 275 aa, artificial sequence
  LG12-clade protease variant
AQTVPWGIPHIKADKAHAAGVTGSGVKVAILDTGIDANHADLNVKGGASFVSGEPNALQDGNGHGTHVAGTVAALDNTTGVLGVAYNADLYAVKVLSASGSGTLSGIAQGIEWSISNRMNVINMSLGEGYGSTALQQACNNAYNRGIVVIAAAGNSGSSGNRNTMDYPARYSSVIAVGAVSSNNTRASFSSVGSELEVMAPGVNILSTTPGNNYASFNGTSMAAPHVAGAAALIKAKYPSMTNVQIRNRLKNTATNLGDPFFYGKGVINVESALQ

SEQ ID NO: 112 - protein, 275 aa, artificial sequence
  LG12-clade protease variant
AQTVPWGIPHIKADKAHAAGVTGSGVKVAILDTGIDANHADLNVKGGASFVSGEPNALQDGNGHGTHVAGTVAALDNTTGVLGVAYNADLYAVKVLSASGSGTLSGIAQGIEWSISNRMNVINMSLGEHTGSTALQQACNNAYNRGIVVIAAAGNSGSSGNRNTMDYPARYSSVIAVGAVSSNNTRASFSSVGSELEVMAPGVNILSTTPGNNYASFNGTSMAAPHVAGAAALIKAKYPSMTNVQIRNRLKNTATNLGDPFFYGKGVINVESALQ

SEQ ID NO: 113 - protein, 275 aa, artificial sequence
  LG12-clade protease variant
AQTVPWGIPHIKADKAHAAGVTGSGVKVAILDTGIDANHADLNVKGGASFVSGEPNALQDGNGHGTHVAGTVAALDNTTGVLGVAYNADLYAVKVLSASGSGTLSGIAQGIEWSISNRMNVINMSLGESRGSTALQQACNNAYNRGIVVIAAAGNSGSSGNRNTMDYPARYSSVIAVGAVSSNNTRASFSSVGSELEVMAPGVNILSTTPGNNYASFNGTSMAAPHVAGAAALIKAKYPSMTNVQIRNRLKNTATNLGDPFFYGKGVINVESALQ

SEQ ID NO: 114 - protein, 275 aa, artificial sequence
  LG12-clade protease variant
AQTVPWGIPHIKADKAHAAGVTGSGVKVAILDTGIDANHADLNVKGGASFVSGEPNALQDGNGHGTHVAGTVAALDNTTGVLGVAYNADLYAVKVLSASGSGTLSGIAQGIEWSISNRMNVINMSLGEVMGSTALQQACNNAYNRGIVVIAAAGNSGSSGNRNTMDYPARYSSVIAVGAVSSNNTRASFSSVGSELEVMAPGVNILSTTPGNNYASFNGTSMAAPHVAGAAALIKAKYPSMTNVQIRNRLKNTATNLGDPFFYGKGVINVESALQ

SEQ ID NO: 115 - protein, 275 aa, artificial sequence
  LG12-clade protease variant
AQTVPWGIPHIKADKAHAAGVTGSGVKVAILDTGIDANHADLNVKGGASFVSGEPNALQDGNGHGTHVAGTVAALDNTTGVLGVAYNADLYAVKVLSASGSGTLSGIAQGIEWSISNRMNVINMSLGGDAGSTALQQACNNAYNRGIVVIAAAGNSGSSGNRNTMDYPARYSSVIAVGAVSSNNTRASFSSVGSELEVMAPGVNILSTTPGNNYASFNGTSMAAPHVAGAAALIKAKYPSMTNVQIRNRLKNTATNLGDPFFYGKGVINVESALQ

SEQ ID NO: 116 - protein, 275 aa, artificial sequence
  LG12-clade protease variant
AQTVPWGIPHIKADKAHAAGVTGSGVKVAILDTGIDANHADLNVKGGASFVSGEPNALQDGNGHGTHVAGTVAALDNTTGVLGVAYNADLYAVKVLSASGSGTLSGIAQGIEWSISNRMNVINMSLGGIAGSTALQQACNNAYNRGIVVIAAAGNSGSSGNRNTMDYPARYSSVIAVGAVSSNNTRASFSSVGSELEVMAPGVNILSTTPGNNYASFNGTSMAAPHVAGAAALIKAKYPSMTNVQIRNRLKNTATNLGDPFFYGKGVINVESALQ

SEQ ID NO: 117 - protein, 275 aa, artificial sequence
  LG12-clade protease variant
AQTVPWGIPHIKADKAHAAGVTGSGVKVAILDTGIDANHADLNVKGGASFVSGEPNALQDGNGHGTHVAGTVAALDNTTGVLGVAYNADLYAVKVLSASGSGTLSGIAQGIEWSISNRMNVINMSLGGVQGSTALQQACNNAYNRGIVVIAAAGNSGSSGNRNTMDYPARYSSVIAVGAVSSNNTRASFSSVGSELEVMAPGVNILSTTPGNNYASFNGTSMAAPHVAGAAALIKAKYPSMTNVQIRNRLKNTATNLGDPFFYGKGVINVESALR

SEQ ID NO: 118 - protein, 275 aa, artificial sequence
  LG12-clade protease variant
AQTVPWGIPHIKADKAHAAGVTGSGVKVAILDTGIDANHADLNVKGGASFVSGEPNALQDGNGHGTHVAGTVAALDNTTGVLGVAYNADLYAVKVLSASGSGTLSGIAQGIEWSISNRMNVINMSLGHKWGSTALQQACNNAYNRGIVVIAAAGNSGSSGNRNTMDYPARYSSVIAVGAVSSNNTRASFSSVGSELEVMAPGVNILSTTPGNNYASFNGTSMAAPHVAGAAALIKAKYPSMTNVQIRNRLKNTATNLGDPFFYGKGVINVESALQ

SEQ ID NO: 119 - protein, 275 aa, artificial sequence
  LG12-clade protease variant
AQTVPWGIPHIKADKAHAAGVTGSGVKVAILDTGIDANHADLNVKGGASFVSGEPNALQDGNGHGTHVAGTVAALDNTTGVLGVAYNADLYAVKVLSASGSGTLSGIAQGIEWSISNRMNVINMSLGHLLGSTALQQACNNAYNRGIVVIAAAGNSGSSGNRNTMDYPARYSSVIAVGAVSSNNTRASFSSVGSELEVMAPGVNILSTTPGNNYASFNGTSMAAPHVAGAAALIKAKYPSMTNVQIRNRLKNTATNLGDPFFYGKGVINVESALQ

SEQ ID NO: 120 - protein, 275 aa, artificial sequence
  LG12-clade protease variant
AQTVPWGIPHIKADKAHAAGVTGSGVKVAILDTGIDANHADLNVKGGASFVSGEPNALQDGNGHGTHVAGTVAALDNTTGVLGVAYNADLYAVKVLSASGSGTLSGIAQGIEWSISNRMNVINMSLGHMYGSTALQQACNNAYNRGIVVIAAAGNSGSSGNRNTMDYPARYSSVIAVGAVSSNNTRASFSSVGSELEVMAPGVNILSTTPGNNYASFNGTSMAAPHVAGAAALIKAKYPSMTNVQIRNRLKNTATNLGDPFFYGKGVINVESALQ

SEQ ID NO: 121 - protein, 275 aa, artificial sequence
  LG12-clade protease variant
AQTVPWGIPHIKADKAHAAGVTGSGVKVAILDTGIDANHADLNVKGGASFVSGEPNALQDGNGHGTHVAGTVAALDNTTGVLGVAYNADLYAVKVLSASGSGTLSGIAQGIEWSISNRMNVINMSLGHNVGSTALQQACNNAYNRGIVVIAAAGNSGSSGNRNTMDYPARYSSVIAVGAVSSNNTRASFSSVGSELEVMAPGVNILSTTPGNNYASFNGTSMAAPHVAGAAALIKAKYPSMTNVQIRNRLKNTATNLGDPFFYGKGVINVESALQ

SEQ ID NO: 122 - protein, 275 aa, artificial sequence
  LG12-clade protease variant
AQTVPWGIPHIKADKAHAAGVTGSGVKVAILDTGIDANHADLNVKGGASFVSGEPNALQDGNGHGTHVAGTVAALDNTTGVLGVAYNADLYAVKVLSASGSGTLSGIAQGIEWSISNRMNVINMSLGHPLGSTALQQACNNAYNRGIVVIAAAGNSGSSGNRNTMDYPARYSSVIAVGAVSSNNTRASFSSVGSELEVMAPGVNILSTTPGNNYASFNGTSMAAPHVAGAAALIKAKYPSMTNVQIRNRLKNTATNLGDPFFYGKGVINVESALQ

SEQ ID NO: 123 - protein, 275 aa, artificial sequence
  LG12-clade protease variant
AQTVPWGIPHIKADKAHAAGVTGSGVKVAILDTGIDANHADLNVKGGASFVSGEPNALQDGNGHGTHVAGTVAALDNTTGVLGVAYNADLYAVKVLSASGSGTLSGIAQGIEWSISNRMNVINMSLGHPNGSTALQQACNNAYNRGIVVIAAAGNSGSSGNRNTMDYPARYSSVIAVGAVSSNNTRASFSSVGSELEVMAPGVNILSTTPGNNYASFNGTSMAAPHVAGAAALIKAKYPSMTNVQIRNRLKNTATNLGDPFFYGKGVINVESALQ

SEQ ID NO: 124 - protein, 275 aa, artificial sequence
  LG12-clade protease variant
AQTVPWGIPHIKADKAHAAGVTGSGVKVAILDTGIDANHADLNVKGGASFVSGEPNALQDGNGHGTHVAGTVAALDNTTGVLGVAYNADLYAVKVLSASGSGTLSGIAQGIEWSISNRMNVINMSLGHPSGSTALQQACNNAYNRGIVVIAAAGNSGSSGNRNTMDYPARYSSVIAVGAVSSNNTRASFSSVGSELEVMAPGVNILSTTPGNNYASFNGTSMAAPHVAGAAALIKAKYPSMTNVQIRNRLKNTATNLGDPFFYGKGVINVESALQ

SEQ ID NO: 125 - protein, 275 aa, artificial sequence
  LG12-clade protease variant
AQTVPWGIPHIKADKAHAAGVTGSGVKVAILDTGIDANHADLNVKGGASFVSGEPNALQDGNGHGTHVAGTVAALDNTTGVLGVAYNADLYAVKVLSASGSGTLSGIAQGIEWSISNRMNVINMSLGHQIGSTALQQACNNAYNRGIVVIAAAGNSGSSGNRNTMDYPARYSSVIAVGAVSSNNTRASFSSVGSELEVMAPGVNILSTTPGNNYASFNGTSMAAPHVAGAAALIKAKYPSMTNVQIRNRLKNTATNLGDPFFYGKGVINVESALQ

SEQ ID NO: 126 - protein, 275 aa, artificial sequence
  LG12-clade protease variant
AQTVPWGIPHIKADKAHAAGVTGSGVKVAILDTGIDANHADLNVKGGASFVSGEPNALQDGNGHGTHVAGTVAALDNTTGVLGVAYNADLYAVKVLSASGSGTLSGIAQGIEWSISNRMNVINMSLGHQWGSTALQQACNNAYNRGIVVIAAAGNSGSSGNRNTMDYPARYSSVIAVGAVSSNNTRASFSSVGSELEVMAPGVNILSTTPGNNYASFNGTSMAAPHVAGAAALIKAKYPSMTNVQIRNRLKNTATNLGDPFFYGKGVINVESALQ

SEQ ID NO: 127 - protein, 275 aa, artificial sequence
  LG12-clade protease variant
AQTVPWGIPHIKADKAHAAGVTGSGVKVAILDTGIDANHADLNVKGGASFVSGEPNALQDGNGHGTHVAGTVAALDNTTGVLGVAYNADLYAVKVLSASGSGTLSGIAQGIEWSISNRMNVINMSLGHRHGSTALQQACNNAYNRGIVVIAAAGNSGSSGNRNTMDYPARYSSVIAVGAVSSNNTRASFSSVGSELEVMAPGVNILSTTPGNNYASFNGTSMAAPHVAGAAALIKAKYPSMTNVQIRNRLKNTATNLGDPFFYGKGVINVESALQ

SEQ ID NO: 128 - protein, 275 aa, artificial sequence
  LG12-clade protease variant
AQTVPWGIPHIKADKAHAAGVTGSGVKVAILDTGIDANHADLNVKGGASFVSGEPNALQDGNGHGTHVAGTVAALDNTTGVLGVAYNADLYAVKVLSASGSGTLSGIAQGIEWSISNRMNVINMSLGHSIGSTALQQACNNAYNRGIVVIAAAGNSGSSGNRNTMDYPARYSSVIAVGAVSSNNTRASFSSVGSELEVMAPGVNILSTTPGNNYASFNGTSMAAPHVAGAAALIKAKYPSMTNVQIRNRLKNTATNLGDPFFYGKGVINVESALQ

SEQ ID NO: 129 - protein, 275 aa, artificial sequence
  LG12-clade protease variant
AQTVPWGIPHIKADKAHAAGVTGSGVKVAILDTGIDANHADLNVKGGASFVSGEPNALQDGNGHGTHVAGTVAALDNTTGVLGVAYNADLYAVKVLSASGSGTLSGIAQGIEWSISNRMNVINMSLGHTHGSTALQQACNNAYNRGIVVIAAAGNSGSSGNRNTMDYPARYSSVIAVGAVSSNNTRASFSSVGSELEVMAPGVNILSTTPGNNYASFNGTSMAAPHVAGAAALIKAKYPSMTNVQIRNRLKNTATNLGDPFFYGKGVINVESALQ

SEQ ID NO: 130 - protein, 275 aa, artificial sequence
  LG12-clade protease variant
AQTVPWGIPHIKADKAHAAGVTGSGVKVAILDTGIDANHADLNVKGGASFVSGEPNALQDGNGHGTHVAGTVAALDNTTGVLGVAYNADLYAVKVLSASGSGTLSGIAQGIEWSISNRMNVINMSLGHTTGSTALQQACNNAYNRGIVVIAAAGNSGSSGNRNTMDYPARYSSVIAVGAVSSNNTRASFSSVGSELEVMAPGVNILSTTPGNNYASFNGTSMAAPHVAGAAALIKAKYPSMTNVQIRNRLKNTATNLGDPFFYGKGVINVESALQ

SEQ ID NO: 131 - protein, 275 aa, artificial sequence
  LG12-clade protease variant
AQTVPWGIPHIKADKAHAAGVTGSGVKVAILDTGIDANHADLNVKGGASFVSGEPNALQDGNGHGTHVAGTVAALDNTTGVLGVAYNADLYAVKVLSASGSGTLSGIAQGIEWSISNRMNVINMSLGHVHGSTALQQACNNAYNRGIVVIAAAGNSGSSGNRNTMDYPARYSSVIAVGAVSSNNTRASFSSVGSELEVMAPGVNILSTTPGNNYASFNGTSMAAPHVAGAAALIKAKYPSMTNVQIRNRLKNTATNLGDPFFYGKGVINVESALQ

SEQ ID NO: 132 - protein, 275 aa, artificial sequence
  LG12-clade protease variant
AQTVPWGIPHIKADKAHAAGVTGSGVKVAILDTGIDANHADLNVKGGASFVSGEPNALQDGNGHGTHVAGTVAALDNTTGVLGVAYNADLYAVKVLSASGSGTLSGIAQGIEWSISNRMNVINMSLGKINGSTALQQACNNAYNRGIVVIAAAGNSGSSGNRNTMDYPARYSSVIAVGAVSSNNTRASFSSVGSELEVMAPGVNILSTTPGNNYASFNGTSMAAPHVAGAAALIKAKYPSMTNVQIRNRLKNTATNLGDPFFYGKGVINVESALQ

SEQ ID NO: 133 - protein, 275 aa, artificial sequence
  LG12-clade protease variant
AQTVPWGIPHIKADKAHAAGVTGSGVKVAILDTGIDANHADLNVKGGASFVSGEPNALQDGNGHGTHVAGTVAALDNTTGVLGVAYNADLYAVKVLSASGSGTLSGIAQGIEWSISNRMNVINMSLGNGNGSTALQQACNNAYNRGIVVIAAAGNSGSSGNRNTMDYPARYSSVIAVGAVSSNNTRASFSSVGSELEVMAPGVNILSTTPGNNYASFNGTSMAAPHVAGAAALIKAKYPSMTNVQIRNRLKNTATNLGDPFFYGKGVINVESALQ

SEQ ID NO: 134 - protein, 275 aa, artificial sequence
  LG12-clade protease variant
AQTVPWGIPHIKADKAHAAGVTGSGVKVAILDTGIDANHADLNVKGGASFVSGEPNALQDGNGHGTHVAGTVAALDNTTGVLGVAYNADLYAVKVLSASGSGTLSGIAQGIEWSISNRMNVINMSLGNMGGSTALQQACNNAYNRGIVVIAAAGNSGSSGNRNTMDYPARYSSVIAVGAVSSNNTRASFSSVGSELEVMAPGVNILSTTPGNNYASFNGTSMAAPHVAGAAALIKAKYPSMTNVQIRNRLKNTATNLGDPFFYGKGVINVESALQ

SEQ ID NO: 135 - protein, 275 aa, artificial sequence
  LG12-clade protease variant
AQTVPWGIPHIKADKAHAAGVTGSGVKVAILDTGIDANHADLNVKGGASFVSGEPNALQDGNGHGTHVAGTVAALDNTTGVLGVAYNADLYAVKVLSASGSGTLSGIAQGIEWSISNRMNVINMSLGNNHGSTALQQACNNAYNRGIVVIAAAGNSGSSGNRNTMDYPARYSSVIAVGAVSSNNTRASFSSVGSELEVMAPGVNILSTTPGNNYASFNGTSMAAPHVAGAAALIKAKYPSMTNVQIRNRLKNTATNLGDPFFYGKGVINVESALQ

SEQ ID NO: 136 - protein, 275 aa, artificial sequence
  LG12-clade protease variant
AQTVPWGIPHIKADKAHAAGVTGSGVKVAILDTGIDANHADLNVKGGASFVSGEPNALQDGNGHGTHVAGTVAALDNTTGVLGVAYNADLYAVKVLSASGSGTLSGIAQGIEWSISNRMNVINMSLGNTQGSTALQQACNNAYNRGIVVIAAAGNSGSSGNRNTMDYPARYSSVIAVGAVSSNNTRASFSSVGSELEVMAPGVNILSTTPGNNYASFNGTSMAAPHVAGAAALIKAKYPSMTNVQIRNRLKNTATNLGDPFFYGKGVINVESALQ

SEQ ID NO: 137 - protein, 275 aa, artificial sequence
  LG12-clade protease variant
AQTVPWGIPHIKADKAHAAGVTGSGVKVAILDTGIDANHADLNVKGGASFVSGEPNALQDGNGHGTHVAGTVAALDNTTGVLGVAYNADLYAVKVLSASGSGTLSGIAQGIEWSISNRMNVINMSLGNVVGSTALQQACNNAYNRGIVVIAAAGNSGSSGNRNTMDYPARYSSVIAVGAVSSNNTRASFSSVGSELEVMAPGVNILSTTPGNNYASFNGTSMAAPHVAGAAALIKAKYPSMTNVQIRNRLKNTATNLGDPFFYGKGVINVESALQ

SEQ ID NO: 138 - protein, 275 aa, artificial sequence
  LG12-clade protease variant
AQTVPWGIPHIKADKAHAAGVTGSGVKVAILDTGIDANHADLNVKGGASFVSGEPNALQDGNGHGTHVAGTVAALDNTTGVLGVAYNADLYAVKVLSASGSGTLSGIAQGIEWSISNRMNVINMSLGNYMGSTALQQACNNAYNRGIVVIAAAGNSGSSGNRNTMDYPARYSSVIAVGAVSSNNTRASFSSVGSELEVMAPGVNILSTTPGNNYASFNGTSMAAPHVAGAAALIKAKYPSMTNVQIRNRLKNTATNLGDPFFYGKGVINVESALQ

SEQ ID NO: 139 - protein, 275 aa, artificial sequence
  LG12-clade protease variant
AQTVPWGIPHIKADKAHAAGVTGSGVKVAILDTGIDANHADLNVKGGASFVSGEPNALQDGNGHGTHVAGTVAALDNTTGVLGVAYNADLYAVKVLSASGSGTLSGIAQGIEWSISNRMNVINMSLGQMHGSTALQQACNNAYNRGIVVIAAAGNSGSSGNRNTMDYPARYSSVIAVGAVSSNNTRASFSSVGSELEVMAPGVNILSTTPGNNYASFNGTSMAAPHVAGAAALIKAKYPSMTNVQIRNRLKNTATNLGDPFFYGKGVINVESALQ

SEQ ID NO: 140 - protein, 275 aa, artificial sequence
  LG12-clade protease variant
AQTVPWGIPHIKADKAHAAGVTGSGVKVAILDTGIDANHADLNVKGGASFVSGEPNALQDGNGHGTHVAGTVAALDNTTGVLGVAYNADLYAVKVLSASGSGTLSGIAQGIEWSISNRMNVINMSLGQRNGSTALQQACNNAYNRGIVVIAAAGNSGSSGNRNTMDYPARYSSVIAVGAVSSNNTRASFSSVGSELEVMAPGVNILSTTPGNNYASFNGTSMAAPHVAGAAALIKAKYPSMTNVQIRNRLKNTATNLGDPFFYGKGVINVESALQ

SEQ ID NO: 141 - protein, 275 aa, artificial sequence
  LG12-clade protease variant
AQTVPWGIPHIKADKAHAAGVTGSGVKVAILDTGIDANHADLNVKGGASFVSGEPNALQDGNGHGTHVAGTVAALDNTTGVLGVAYNADLYAVKVLSASGSGTLSGIAQGIEWSISNRMNVINMSLGRVEGSTALQQACNNAYNRGIVVIAAAGNSGSSGNRNTMDYPARYSSVIAVGAVSSNNTRASFSSVGSELEVMAPGVNILSTTPGNNYASFNGTSMAAPHVAGAAALIKAKYPSMTNVQIRNRLKNTATNLGDPFFYGKGVINVESALQ

SEQ ID NO: 142 - protein, 275 aa, artificial sequence
  LG12-clade protease variant
AQTVPWGIPHIKADKAHAAGVTGSGVKVAILDTGIDANHADLNVKGGASFVSGEPNALQDGNGHGTHVAGTVAALDNTTGVLGVAYNADLYAVKVLSASGSGTLSGIAQGIEWSISNRMNVINMSLGSEWGSTALQQACNNAYNRGIVVIAAAGNSGSSGNRNTMDYPARYSSVIAVGAVSSNNTRASFSSVGSELEVMAPGVNILSTTPGNNYASFNGTSMAAPHVAGAAALIKAKYPSMTNVQIRNRLKNTATNLGDPFFYGKGVINVESALQ

SEQ ID NO: 143 - protein, 275 aa, artificial sequence
  LG12-clade protease variant
AQTVPWGIPHIKADKAHAAGVTGSGVKVAILDTGIDANHADLNVKGGASFVSGEPNALQDGNGHGTHVAGTVAALDNTTGVLGVAYNADLYAVKVLSASGSGTLSGIAQGIEWSISNRMNVINMSLGSHQGSTALQQACNNAYNRGIVVIAAAGNSGSSGNRNTMDYPARYSSVIAVGAVSSNNTRASFSSVGSELEVMAPGVNILSTTPGNNYASFNGTSMAAPHVAGAAALIKAKYPSMTNVQIRNRLKNTATNLGDPFFYGKGVINVESALQ

SEQ ID NO: 144 - protein, 275 aa, artificial sequence
  LG12-clade protease variant
AQTVPWGIPHIKADKAHAAGVTGSGVKVAILDTGIDANHADLNVKGGASFVSGEPNALQDGNGHGTHVAGTVAALDNTTGVLGVAYNADLYAVKVLSASGSGTLSGIAQGIEWSISNRMNVINMSLGSIRGSTALQQACNNAYNRGIVVIAAAGNSGSSGNRNTMDYPARYSSVIAVGAVSSNNTRASFSSVGSELEVMAPGVNILSTTPGNNYASFNGTSMAAPHVAGAAALIKAKYPSMTNVQIRNRLKNTATNLGDPFFYGKGVINVESALQ

SEQ ID NO: 145 - protein, 275 aa, artificial sequence
  LG12-clade protease variant
AQTVPWGIPHIKADKAHAAGVTGSGVKVAILDTGIDANHADLNVKGGASFVSGEPNALQDGNGHGTHVAGTVAALDNTTGVLGVAYNADLYAVKVLSASGSGTLSGIAQGIEWSISNRMNVINMSLGSLEGSTALQQACNNAYNRGIVVIAAAGNSGSSGNRNTMDYPARYSSVIAVGAVSSNNTRASFSSVGSELEVMAPGVNILSTTPGNNYASFNGTSMAAPHVAGAAALIKAKYPSMTNVQIRNRLKNTATNLGDPFFYGKGVINVESALQ

SEQ ID NO: 146 - protein, 275 aa, artificial sequence
  LG12-clade protease variant
AQTVPWGIPHIKADKAHAAGVTGSGVKVAILDTGIDANHADLNVKGGASFVSGEPNALQDGNGHGTHVAGTVAALDNTTGVLGVAYNADLYAVKVLSASGSGTLSGIAQGIEWSISNRMNVINMSLGSLMGSTALQQACNNAYNRGIVVIAAAGNSGSSGNRNTMDYPARYSSVIAVGAVSSNNTRASFSSVGSELEVMAPGVNILSTTPGNNYASFNGTSMAAPHVAGAAALIKAKYPSMTNVQIRNRLKNTATNLGDPFFYGKGVINVESALQ

SEQ ID NO: 147 - protein, 275 aa, artificial sequence
  LG12-clade protease variant
AQTVPWGIPHIKADKAHAAGVTGSGVKVAILDTGIDANHADLNVKGGASFVSGEPNALQDGNGHGTHVAGTVAALDNTTGVLGVAYNADLYAVKVLSASGSGTLSGIAQGIEWSISNRMNVINMSLGSNVGSTALQQACNNAYNRGIVVIAAAGNSGSSGNRNTMDYPARYSSVIAVGAVSSNNTRASFSSVGSELEVMAPGVNILSTTPGNNYASFNGTSMAAPHVAGAAALIKAKYPSMTNVQIRNRLKNTATNLGDPFFYGKGVINVESALQ

SEQ ID NO: 148 - protein, 275 aa, artificial sequence
  LG12-clade protease variant
AQTVPWGIPHIKADKAHAAGVTGSGVKVAILDTGIDANHADLNVKGGASFVSGEPNALQDGNGHGTHVAGTVAALDNTTGVLGVAYNADLYAVKVLSASGSGTLSGIAQGIEWSISNRMNVINMSLGSPAGSTALQQACNNAYNRGIVVIAAAGNSGSSGNRNTMDYPARYSSVIAVGAVSSNNTRASFSSVGSELEVMAPGVNILSTTPGNNYASFNGTSMAAPHVAGAAALIKAKYPSMTNVQIRNRLKNTATNLGDPFFYGKGVINVESALQ

SEQ ID NO: 149 - protein, 275 aa, artificial sequence
  LG12-clade protease variant
AQTVPWGIPHIKADKAHAAGVTGSGVKVAILDTGIDANHADLNVKGGASFVSGEPNALQDGNGHGTHVAGTVAALDNTTGVLGVAYNADLYAVKVLSASGSGTLSGIAQGIEWSISNRMNVINMSLGSQSGSTALQQACNNAYNRGIVVIAAAGNSGSSGNRNTMDYPARYSSVIAVGAVSSNNTRASFSSVGSELEVMAPGVNILSTTPGNNYASFNGTSMAAPHVAGAAALIKAKYPSMTNVQIRNRLKNTATNLGDPFFYGKGVINVESALQ

SEQ ID NO: 150 - protein, 275 aa, artificial sequence
  LG12-clade protease variant
AQTVPWGIPHIKADKAHAAGVTGSGVKVAILDTGIDANHADLNVKGGASFVSGEPNALQDGNGHGTHVAGTVAALDNTTGVLGVAYNADLYAVKVLSASGSGTLSGIAQGIEWSISNRMNVINMSLGSVLGSTALQQACNNAYNRGIVVIAAAGNSGSSGNRNTMDYPARYSSVIAVGAVSSNNTRASFSSVGSELEVMAPGVNILSTTPGNNYASFNGTSMAAPHVAGAAALIKAKYPSMTNVQIRNRLKNTATNLGDPFFYGKGVINVESALQ

SEQ ID NO: 151 - protein, 275 aa, artificial sequence
  LG12-clade protease variant
AQTVPWGIPHIKADKAHAAGVTGSGVKVAILDTGIDANHADLNVKGGASFVSGEPNALQDGNGHGTHVAGTVAALDNTTGVLGVAYNADLYAVKVLSASGSGTLSGIAQGIEWSISNRMNVINMSLGSVQGSTALQQACNNAYNRGIVVIAAAGNSGSSGNRNTMDYPARYSSVIAVGAVSSNNTRASFSSVGSELEVMAPGVNILSTTPGNNYASFNGTSMAAPHVAGAAALIKAKYPSMTNVQIRNRLKNTATNLGDPFFYGKGVINVESALQ

SEQ ID NO: 152 - protein, 275 aa, artificial sequence
  LG12-clade protease variant
AQTVPWGIPHIKADKAHAAGVTGSGVKVAILDTGIDANHADLNVKGGASFVSGEPNALQDGNGHGTHVAGTVAALDNTTGVLGVAYNADLYAVKVLSASGSGTLSGIAQGIEWSISNRMNVINMSLGTKLGSTALQQACNNAYNRGIVVIAAAGNSGSSGNRNTMDYPARYSSVIAVGAVSSNNTRASFSSVGSELEVMAPGVNILSTTPGNNYASFNGTSMAAPHVAGAAALIKAKYPSMTNVQIRNRLKNTATNLGDPFFYGKGVINVESALQ

SEQ ID NO: 153 - protein, 275 aa, artificial sequence
  LG12-clade protease variant
AQTVPWGIPHIKADKAHAAGVTGSGVKVAILDTGIDANHADLNVKGGASFVSGEPNALQDGNGHGTHVAGTVAALDNTTGVLGVAYNADLYAVKVLSASGSGTLSGIAQGIEWSISNRMNVINMSLGVHEGSTALQQACNNAYNRGIVVIAAAGNSGSSGNRNTMDYPARYSSVIAVGAVSSNNTRASFSSVGSELEVMAPGVNILSTTPGNNYASFNGTSMAAPHVAGAAALIKAKYPSMTNVQIRNRLKNTATNLGDPFFYGKGVINVESALQ

SEQ ID NO: 154 - protein, 275 aa, artificial sequence
  LG12-clade protease variant
AQTVPWGIPHIKADKAHAAGVTGSGVKVAILDTGIDANHADLNVKGGASFVSGEPNALQDGNGHGTHVAGTVAALDNTTGVLGVAYNADLYAVKVLSASGSGTLSGIAQGIEWSISNRMNVINMSLGWHDGSTALQQACNNAYNRGIVVIAAAGNSGSSGNRNTMDYPARYSSVIAVGAVSSNNTRASFSSVGSELEVMAPGVNILSTTPGNNYASFNGTSMAAPHVAGAAALIKAKYPSMTNVQIRNRLKNTATNLGDPFFYGKGVINVESALQ

SEQ ID NO: 155 - protein, 275 aa, artificial sequence
  LG12-clade protease variant
AQTVPWGIPHIKADKAHAAGVTGSGVKVAILDTGIDANHADLNVKGGASFVSGEPNALQDGNGHGTHVAGTVAALDNTTGVLGVAYNADLYAVKVLSASGSGTLSGIAQGIEWSISNRMNVINMSLGWLSGSTALQQACNNAYNRGIVVIAAAGNSGSSGNRNTMDYPARYSSVIAVGAVSSNNTRASFSSVGSELEVMAPGVNILSTTPGNNYASFNGTSMAAPHVAGAAALIKAKYPSMTNVQIRNRLKNTATNLGDPFFYGKGVINVESALQ

SEQ ID NO: 156 - protein, 275 aa, artificial sequence
  LG12-clade protease variant
AQTVPWGIPHIKADKAHAAGVTGSGVKVAILDTGIDANHADLNVKGGASFVSGEPNALQDGNGHGTHVAGTVAALDNTTGVLGVAYNADLYAVKVLSASGSGTLSGIAQGIEWSISNRMNVINMSLGWQFGSTALQQACNNAYNRGIVVIAAAGNSGSSGNRNTMDYPARYSSVIAVGAVSSNNTRASFSSVGSELEVMAPGVNILSTTPGNNYASFNGTSMAAPHVAGAAALIKAKYPSMTNVQIRNRLKNTATNLGDPFFYGKGVINVESALQ

SEQ ID NO: 157 - protein, 275 aa, artificial sequence
  LG12-clade protease variant
AQTVPWGIPHIKADKAHAAGVTGSGVKVAILDTGIDANHADLNVKGGASFVSGEPNALQDGNGHGTHVAGTVAALDNTTGVLGVAYNADLYAVKVLSASGSGTLSGIAQGIEWSISNRMNVINMSLGWYDGSTALQQACNNAYNRGIVVIAAAGNSGSSGNRNTMDYPARYSSVIAVGAVSSNNTRASFSSVGSELEVMAPGVNILSTTPGNNYASFNGTSMAAPHVAGAAALIKAKYPSMTNVQIRNRLKNTATNLGDPFFYGKGVINVESALQ

SEQ ID NO: 158 - protein, 275 aa, artificial sequence
  LG12-clade protease variant
AQTVPWGIPHIKADKAHAAGVTGSGVKVAILDTGIDANHADLNVKGGASFVSGEPNALQDGNGHGTHVAGTVAALDNTTGVLGVAYNADLYAVKVLSASGSGTLSGIAQGIEWSISNRMNVINMSLGYGTGSTALQQACNNAYNRGIVVIAAAGNSGSSGNRNTMDYPARYSSVIAVGAVSSNNTRASFSSVGSELEVMAPGVNILSTTPGNNYASFNGTSMAAPHVAGAAALIKAKYPSMTNVQIRNRLKNTATNLGDPFFYGKGVINVESALQ

SEQ ID NO: 159 - protein, 275 aa, artificial sequence
  LG12-clade protease variant
AQTVPWGIPHIKADKAHAAGVTGSGVKVAILDTGIDANHADLNVKGGASFVSGEPNALQDGNGHGTHVAGTVAALDNTTGVLGVAYNADLYAVKVLSASGSGTLSGIAQGIEWSISNRMNVINMSLGYPDGSTALQQACNNAYNRGIVVIAAAGNSGSSGNRNTMDYPARYSSVIAVGAVSSNNTRASFSSVGSELEVMAPGVNILSTTPGNNYASFNGTSMAAPHVAGAAALIKAKYPSMTNVQIRNRLKNTATNLGDPFFYGKGVINVESALQ

SEQ ID NO: 160 - protein, 275 aa, artificial sequence
  LG12-clade protease variant
AQTVPWGIPHIKADKAHAAGVTGSGVKVAILDTGIDANHADLNVKGGASFVSGEPNALQDGNGHGTHVAGTVAALDNTTGVLGVAYNADLYAVKVLSASGSGTLSGIAQGIEWSISNRMNVINMSLGYVMGSTALQQACNNAYNRGIVVIAAAGNSGSSGNRNTMDYPARYSSVIAVGAVSSNNTRASFSSVGSELEVMAPGVNILSTTPGNNYASFNGTSMAAPHVAGAAALIKAKYPSMTNVQIRNRLKNTATNLGDPFFYGKGVINVESALQ

SEQ ID NO: 161 - protein, 275 aa, artificial sequence
  LG12-clade protease variant
AQTVPWGIPHIKADKAHAAGVTGSGVKVAILDTGIDANHADLNVKGGASFVSGEPNALQDGNGHGTHVAGTVAALNNTTGVLGVAYNADLYAVKVLSASGSGTLSGIAQGIEWSISNGMNVINMSLGTHDGSTALQQACNNAYNRGIVVIAAAGNSGSSGNRNTMDYPARYSSVIAVGAVSSNNTRASFSSVGSELEVMAPGVNILSTTPGNNYASFNGTSMAAPHVAGAAALIKAKYPSMTNVQIRNRLKNTATNLGDPFFYGKGVINVESALQ

SEQ ID NO: 162 - protein, 275 aa, artificial sequence
  LG12-clade protease variant
AQTVPWGIPHIKADKAHAAGVTGSGVKVAILDTGIDANHADLNVKGGASFVSGEPNALQDGNGHGTHVAGTVAALNNTTGVLGVAYNADLYAVKVLSASGSGTLSGIAQGIEWSISNRMNVINMSLGLMNGSTALQQACNNAYNRGIVVIAAAGNSGSSGNRNTMDYPARYSSVIAVGAVSSNNTRASFSSVGSELEVMAPGVNILSTTPGNNYASFNGTSMAAPHVAGAAALIKAKYPSMTNVQIRNRLKNTATNLGDPFFYGKGVINVESALQ

SEQ ID NO: 163 - protein, 275 aa, artificial sequence
  LG12-clade protease variant
AQTVPWGIPHIKADKAHAAGVTGSGVKVAILDTGIDANHADLNVKGGASFVSGEPNALQDGNGHGTHVAGTVAALNNTTGVLGVAYNADLYAVKVLSASGSGTLSGIAQGIEWSISNRMNVINMSLGMLQGSTALQQACNNAYNRGIVVIAAAGNSGSSGNRNTMDYPARYSSVIAVGAVSSNNTRASFSSVGSELEVMAPGVNILSTTPGNNYASFNGTSMAAPHVAGAAALIKAKYPSMTNVQIRNRLKNTATNLGDPFFYGKGVINVESALQ

SEQ ID NO: 164 - protein, 275 aa, artificial sequence
  LG12-clade protease variant
AQTVPWGIPHIKADKAHAAGVTGSGVKVAILDTGIDANHADLNVKGGASFVSGEPNALQDGNGHGTHVAGTVAALNNTTGVLGVAYNADLYAVKVLSASGSGTLSGIAQGIEWSISNGMNVINMSLGGSSGSTALQQACNNAYNRGIVVIAAAGNSGSDGNRNTMHYPARYSSVIAVGAVSSNNTRASFSSVGSELEVMAPGVNILSTTPGNNYASFNGTSMAAPHVAGAAALIKAKYPSMTNVQIRERLKNTATNLGDPFFYGKGVINVESALQ

SEQ ID NO: 165 - protein, 275 aa, artificial sequence
  LG12-clade protease variant
AQTVPWGIPHIKADKAHAAGVTGSGVKVAILDTGIDATHADLNVKGGASFVSGEPNALQDGNGHGTHVAGTVAALNNTTGVLGVAYNADLYAVKVLSASGSGTLSGIAQGIEWSISNGMNVINMSLGGSSGSTALQQACDNAYNRGIVVIAAAGNSGSDGNRNTMYYPARYSSVIAVGAVSSNNQRASFSSVGSELEVMAPGVNILSTTPGNNYASFNGTSMAAPHVAGAAALIKAKYPSMTNVQIRERLKNTATNLGDPFFYGKGVINVESALQ

SEQ ID NO: 166 - protein, 275 aa, artificial sequence
  LG12-clade protease variant
AQTVPWGIPHIKADKAHAAGVTGSGVKVAILDTGIDATHADLNVKGGASFVSGEPNALQDGNGHGTHVAGTVAALNNTTGVLGVAYNADLYAVKVLSASGSGTLSGIAQGIEWSISNGMNVINMSLGGSSGSTALQQACNNAYNRGIVVIAAAGNHGSDGNRNTMYYPARYSSVIAVGAVSSNNQRASFSSVGSELEVMAPGVNILSTTPGNNYASFNGTSMAAPHVAGAAALIKAKYPSMTNVQIRERLKNTATNLGDPFFYGKGVINVEQALQ

SEQ ID NO: 167 - protein, 275 aa, artificial sequence
  LG12-clade protease variant
AQTVPWGIPHIKADKAHAAGVTGSGVKVAILDTGIDATHADLNVKGGASFVSGEPNALQDGNGHGTHVAGTVAALNNTTGVLGVAYNADLYAVKVLSASGSGTLSGIAQGIEWSISNGMNVINMSLGGSSGSTALQQACNNAYNRGIVVIAAAGNHGSSGNRNTMYYPARYSSVIAVGAVSSNNTRASFSSVGSELEVMAPGVNILSTTPGNNYASFNGTSLAAPHVAGAAALIKAKYPSMTNVQIRERLKNTATNLGDPFFYGKGVINVESALQ

SEQ ID NO: 168 - protein, 275 aa, artificial sequence
  LG12-clade protease variant
AQTVPWGIPHIKADKAHAAGVTGSGVKVAILDTGIDATHADLNVKGGASFVSGEPNALQDGNGHGTHVAGTVAALNNTTGVLGVAYNADLYAVKVLSASGSGTLSGIAQGIEWSISNGMNVINMSLGGSSGSTALQQACNNAYNRGIVVIAAAGNHGSDGNRNTMYYPARYSSVIAVGAVSSNNTRASFSSVGSELEVMAPGVNILSTTPGNNYASFNGTSMAAPHVAGAAALIKAKYPSMTNVQIRERLKNTATNLGDPFFYGKGVINVEQALQ

SEQ ID NO: 169 - protein, 275 aa, artificial sequence
  LG12-clade protease variant
AQTVPWGIPHIKADKAHAAGVTGSGVKVAILDTGIDANHADLNVKGGASFVSGEPNALQDGNGHGTHVAGTVAALNNTTGVLGVAYNADLYAVKVLSASGSGTLSGIAQGIEWSISNGMNVINMSLGGSSGSTALQQACDNAYNRGIVLIAAAGNHGSSGNRNTMNYPARYSSVIAVGAVSSNNTRASFSSVGSELEVMAPGVNILSTTPGNNYASFNGTSMAAPHVAGAAALIKAKYPSMTNVQIRERLKNTATNLGDPFFYGKGVINVEQALQ

SEQ ID NO: 170 - protein, 275 aa, artificial sequence
  LG12-clade protease variant
AQTVPWGIPHIKADKAHAAGVTGSGVKVAILDTGIDANHADLNVKGGASFVSGEPNALQDGNGHGTHVAGTVAALNNTTGVLGVAYNADLYAVKVLSASGSGTLSGIAQGIEWSISNGMNVINMSLGGSSGSTALQQACDNAYNRGIVLIAAAGNSGSDGNRNTMYYPARYSSVIAVGAVSSNNQRASFSSVGSELEVMAPGVNILSTTPGNNYASFNGTSMAAPHVAGAAALIKAKYPSMTNVQIRERLKNTATNLGDPFFYGKGVINVESALQ

SEQ ID NO: 171 - protein, 275 aa, artificial sequence
  LG12-clade protease variant
AQTVPWGIPHIKADKAHAAGVTGSGVKVAILDTGIDATHADLNVKGGASFVSGEPNALQDGNGHGTHVAGTVAALNNTTGVLGVAYNADLYAVKVLSASGSGTLSGIAQGIEWSISNGMNVINMSLGGSSGSTALQQACDNAYNRGIVLIAAAGNHGSDGNRNTMYYPARYSSVIAVGAVSSNNQRASFSSVGSELEVMAPGVNILSTTPGNNYASFNGTSMAAPHVAGAAALIKAKYPSMTNVQIRERLKNTATNLGDPFFYGKGVINVEQALQ

SEQ ID NO: 172 - protein, 275 aa, artificial sequence
  LG12-clade protease variant
AQTVPWGIPHIKADKAHAAGVTGSGVKVAILDTGIDANHADLNVKGGASFVSGEPNALQDGNGHGTHVAGTVAALNNTTGVLGVAYNADLYAVKVLSASGSGTLSGIAQGIEWSISNGMNVINMSLGGSSGSTALQQACDNAYNRGIVVIAAAGNSGSDGNRNTMYYPARYSSVIAVGAVSSNNQRASFSSVGSELEVMAPGVNILSTTPGNNYASFNGTSMAAPHVAGAAALIKAKYPSMTNVQIRERLKNTATNLGDPFFYGKGVINVESALQ

SEQ ID NO: 173 - protein, 275 aa, artificial sequence
  LG12-clade protease variant
AQTVPWGIPHIKADKAHAAGVTGSGVKVAILDTGIDANHADLNVKGGASFVSDEPNALQDGNGHGTHVAGTVAALDNTTGVLGVAYNADLYAVKVLSASGSGTLSGIAQGIEWSISNGMNVINMSLGGSSGSTALQQACNNAYNRGIVVIAAAGNSGSSGNRNTMDYPARYSSVIAVGAVSSNNTRASFSSVGSELEVMAPGVNILSTTPGNNYASFNGTSMAAPHVAGAAALIKAKYPSMTNVQIRERLKNTATNLGDPFFYGKGVINVEKALQ

SEQ ID NO: 174 - protein, 275 aa, artificial sequence
  LG12-clade protease variant
AQTVPWGIPHIKADKAHAAGVTGSGVKVAILDTGIDANHADLNVKGGASFVSDEPNALQDGNGHGTHVAGTVAALDNTTGVLGVAYNADLYAVKVLSASGSGTLSGIAQGIEWSISNGMNVINMSLGGSSGSTALQQACNNAYNRGIVVIAAAGNSGSSGNRNTMDYPARYSSVIAVGAVSSNNTRASFSSVGSELEVMAPGVNILSTTPGNNYASFNGTSMAAPHVAGAAALIKAKYPSMTNVQIRERLKNTATRLGDPFFYGKGVINVEKALQ

SEQ ID NO: 175 - protein, 275 aa, artificial sequence
  LG12-clade protease variant
AQTVPWGIPHIKADKAHAAGVTGSGVKVAILDTGIDANHADLNVKGGASFVSDEPNALQDGNGHGTHVAGTVAALDNTTGVLGVAYNADLYAVKVLSASGSGTLSGIAQGIEWSISNRMNVINMSLGGSSGSTALQQACNNAYNRGIVVIAAAGNSGSSGNRNTMGYPARYSSVIAVGAVSSNNTRASFSSVGSELEVMAPGVNILSTTPGNNYASFNGTSMAAPHVAGAAALIKAKYPSMTNVQIRERLKNTATRLGDPFFYGKGVINVEKALQ

SEQ ID NO: 176 - protein, 275 aa, artificial sequence
  LG12-clade protease variant
AQTVPWGIPHIKADKAHAAGVTGSGVKVAILDTGIDANHADLNVKGGASFVSDEPNALQDGNGHGTHVAGTVAALNNTTGVLGVAYNADLYAVKVLSASGSGTLSGIAQGIEWSISNGMNVINMSLGGSSGSTALQQACNNAYNRGIVVIAAAGNSGSSGNRNTMDYPARYSSVIAVGAVSSNNTRASFSSVGSELEVMAPGVNILSTTPGNNYASFNGTSMAAPHVAGAAALIKAKYPSMTNVQIRERLKNTATNLGDPFFYGKGVINVEKALQ

SEQ ID NO: 177 - protein, 275 aa, artificial sequence
  LG12-clade protease variant
AQTVPWGIPHIKADKAHAAGVTGSGVKVAILDTGIDANHADLNVKGGASFVSDEPNALQDGNGHGTHVAGTVAALNNTTGVLGVAYNADLYAVKVLSASGSGTLSGIAQGIEWSISNGMNVINMSLGGSSGSTALQQACNNAYNRGIVVIAAAGNSGSSGNRNTMDYPARYSSVIAVGAVSSNNTRASFSSVGSELEVMAPGVNILSTTPGNNYASFNGTSMAAPHVAGAAALIKAKYPSMTNVQIRERLKNTATNLGDPFFYGKGVINVESALQ

SEQ ID NO: 178 - protein, 275 aa, artificial sequence
  LG12-clade protease variant
AQTVPWGIPHIKADKAHAAGVTGSGVKVAILDTGIDANHADLNVKGGASFVSDEPNALQDGNGHGTHVAGTVAALNNTTGVLGVAYNADLYAVKVLSASGSGTLSGIAQGIEWSISNRMNVINMSLGGSSGSTALQQACNNAYNRGIVVIAAAGNSGSSGNRNTMDYPARYSSVIAVGAVSSNNTRASFSSVGSELEVMAPGVNILSTTPGNNYASFNGTSMAAPHVAGAAALIKAKYPSMTNVQIRERLKNTATNLGDPFFYGKGVINVESALQ

SEQ ID NO: 179 - protein, 275 aa, artificial sequence
  LG12-clade protease variant
AQTVPWGIPHIKADKAHAAGVTGSGVKVAILDTGIDANHADLNVKGGASFVSGEPNALQDGNGHGTHVAGTVAALDNTTGVLGVAYNADLYAVKVLSASGSGTLSGIAQGIEWSISNGMNVINMSLGGSSGSTALQQACNNAYNRGIVVIAAAGNSGSSGNRNTMDYPARYSSVIAVGAVSSNNTRASFSSVGSELEVMAPGVNILSTTPGNNYASFNGTSMAAPHVAGAAALIKAKYPSMTNVQIRERLKNTATNLGDPFFYGKGVINVEKALQ

SEQ ID NO: 180 - protein, 275 aa, artificial sequence
  LG12-clade protease variant
AQTVPWGIPHIKADKAHAAGVTGSGVKVAILDTGIDANHADLNVKGGASFVSGEPNALQDGNGHGTHVAGTVAALDNTTGVLGVAYNADLYAVKVLSASGSGTLSGIAQGIEWSISNGMNVINMSLGGSSGSTALQQACNNAYNRGIVVIAAAGNSGSSGNRNTMDYPARYSSVIAVGAVSSNNTRASFSSVGSELEVMAPGVNILSTTPGNNYASFNGTSMAAPHVAGAAALIKAKYPSMTNVQIRERLKNTATRLGDPFFYGKGVINVESALQ

SEQ ID NO: 181 - protein, 275 aa, artificial sequence
  LG12-clade protease variant
AQTVPWGIPHIKADKAHAAGVTGSGVKVAILDTGIDANHADLNVKGGASFVSGEPNALQDGNGHGTHVAGTVAALDNTTGVLGVAYNADLYAVKVLSASGSGTLSGIAQGIEWSISNGMNVINMSLGGSSGSTALQQACNNAYNRGIVVIAAAGNSGSSGNRNTMDYPARYSSVIAVGAVSSNNTRASFSSVGSELEVMAPGVNILSTTPGNNYASFNGTSMAAPHVAGAAALIKAKYPSMTNVQIRKRLKNTATNLGDPFFYGKGVINVESALQ

SEQ ID NO: 182 - protein, 275 aa, artificial sequence
  LG12-clade protease variant
AQTVPWGIPHIKADKAHAAGVTGSGVKVAILDTGIDANHADLNVKGGASFVSGEPNALQDGNGHGTHVAGTVAALDNTTGVLGVAYNADLYAVKVLSASGSGTLSGIAQGIEWSISNRMNVINMSLGGSSGSTALQQACNNAYNRGIVVIAAAGNSGSSGNRNTMDYPARYSSVIAVGAVSSNNTRASFSSVGSELEVMAPGVNILSTTPGNNYASFNGTSMAAPHVAGAAALIKAKYPSMTNVQIRERLKNTATNLGDPFFYGKGVINVESALQ

SEQ ID NO: 183 - protein, 275 aa, artificial sequence
  LG12-clade protease variant
AQTVPWGIPHIKADKAHAAGVTGSGVKVAILDTGIDANHADLNVKGGASFVSGEPNALQDGNGHGTHVAGTVAALDNTTGVLGVAYNADLYAVKVLSASGSGTLSGIAQGIEWSISNRMNVINMSLGGSSGSTALQQACNNAYNRGIVVIAAAGNSGSSGNRNTMDYPARYSSVIAVGAVSSNNTRASFSSVGSELEVMAPGVNILSTTPGNNYASFNGTSMAAPHVAGAAALIKAKYPSMTNVQIRERLKNTATRLGDPFFYGKGVINVESALQ

SEQ ID NO: 184 - protein, 275 aa, artificial sequence
  LG12-clade protease variant
AQTVPWGIPHIKADKAHAAGVTGSGVKVAILDTGIDANHADLNVKGGASFVSGEPNALQDGNGHGTHVAGTVAALNNTTGVLGVAYNADLYAVKVLSASGSGTLSGIAQGIEWSISNGMNVINMSLGGSSGSTALQQACNNAYNRGIVVIAAAGNSGSSGNRNTMDYPARYSSVIAVGAVSSNNTRASFSSVGSELEVMAPGVNILSTTPGNNYASFNGTSMAAPHVAGAAALIKAKYPSMTNVQIRERLKNTATNLGDPFFYGKGVINVEKALQ

SEQ ID NO: 185 - protein, 275 aa, artificial sequence
  LG12-clade protease variant
AQTVPWGIPHIKADKAHAAGVTGSGVKVAILDTGIDANHADLNVKGGASFVSGEPNALQDGNGHGTHVAGTVAALNNTTGVLGVAYNADLYAVKVLSASGSGTLSGIAQGIEWSISNRMNVINMSLGGSSGSTALQQACNNAYNRGIVVIAAAGNSGSSGNRNTMDYPARYSSVIAVGAVSSNNTRASFSSVGSELEVMAPGVNILSTTPGNNYASFNGTSMAAPHVAGAAALIKAKYPSMTNVQIRERLKNTATRLGDPFFYGKGVINVEKALQ

SEQ ID NO: 186 - protein, 275 aa, artificial sequence
  LG12-clade protease variant
AQTVPWGIPHIKADKAHAAGVTGSGVKVAILDTGIDANHADLNVKGGASFVSDEPNALQDGNGHGTHVAGTVAALNNTTGVLGVAYNADLYAVKVLSASGSGTLSGIAQGIEWSISNRMNVINMSLGGSSGSTALQQACNNAYNRGIVVIAAAGNSGSSGNRNTMDYPARYSSVIAVGAVSSNNTRASFSSVGSELEVMAPGVNILSTTPGNNYASFNGTSMAAPHVAGAAALIKAKYPSMTNVQIRERLKNTATNLGDPFFYGKGVINVEKALQ

SEQ ID NO: 187 - protein, 275 aa, artificial sequence
  LG12-clade protease variant
AQTVPWGIPHIKADKAHAAGVTGSGVKVAILDTGIDANHADLNVKGGASFVSDEPNALQDGNGHGTHVAGTVAALNNTTGVLGVAYNADLYAVKVLSASGSGTLSGIAQGIEWSISNRMNVINMSLGGSSGSTALQQACNNAYNRGIVVIAAAGNSGSSGNRNTMDYPARYSSVIAVGAVSSNNTRASFSSVGSELEVMAPGVNILSTTPGNNYASFNGTSMAAPHVAGAAALIKAKYPSMTNVQIRERLKNTATRLGDPFFYGKGVINVEKALQ

SEQ ID NO: 188 - protein, 275 aa, artificial sequence
  LG12-clade protease variant
AQTVPWGIPHIKADKAHAAGVTGSGVKVAILDTGIDANHADLNVKGGASFVSDEPNALQDGNGHGTHVAGTVAALDNTTGVLGVAYNADLYAVKVLSASGSGTLSGIAQGIEWSISNGMNVINMSLGGSSGSTALQQACNNAYNRGIVVIAAAGNSGSSGNRNTMDYPARYSSVIAVGAVSSNNTRASFSSVGSELEVMAPGVNILSTTPGNNYASFNGTSMAAPHVAGAAALIKAKYPSMTNVQIRKRLKNTATNLGDPFFYGKGVINVEKALQ

SEQ ID NO: 189 - protein, 275 aa, artificial sequence
  LG12-clade protease variant
AQTVPWGIPHIKADKAHAAGVTGSGVKVAILDTGIDANHADLNVKGGASFVSGEPNALQDGNGHGTHVAGTVAALDNTTGVLGVAYNADLYAVKVLSASGSGTLSGIAQGIEWSISNGMNVINMSLGGSSGSTALQQACNNAYNRGIVVIAAAGNSGSSGNRNTMDYPARYSSVIAVGAVSSNNTRASFSSVGSELEVMAPGVNILSTTPGNNYASFNGTSMAAPHVAGAAALIKAKYPSMTNVQIRERLKNTATNLGDPFFYGKGVINVESALQ

SEQ ID NO: 190 - protein, 275 aa, artificial sequence
  LG12-clade protease variant
AQTVPWGIPHIKADKAHAAGVTGSGVKVAILDTGIDANHADLNVKGGASFVSGEPNALQDGNGHGTHVAGTVAALDNTTGVLGVAYNADLYAVKVLSASGSGTLSGIAQGIEWSISNRMNVINMSLGGSSGSTALQQACNNAYNRGIVVIAAAGNSGSSGNRNTMDYPARYSSVIAVGAVSSNNTRASFSSVGSELEVMAPGVNILSTTPGNNYASFNGTSMAAPHVAGAAALIKAKYPSMTNVQIRERLKNTATRLGDPFFYGKGVINVEKALQ

SEQ ID NO: 191 - protein, 275 aa, artificial sequence
  LG12-clade protease variant
AQTVPWGIPHIKADKAHAAGVTGSGVKVAILDTGIDANHADLNVKGGESFVTGEPNALQDGNGHGTHVAGTVAALNNTTGVLGVAYNADLYAVKVLSASGSGTLSGIAQGIEWSISNGMNVINMSLGGSSGSTALQQACNNAYNRGIVGIAAAGNNGSSGNRNTMDYPARYSSVIAVGAVSSNNTRASFSSVGSELEVMAPGVNILSTTPGNNYASRNGTSMAAPHVAGAAALIKAKYPSMTNVQIRERLKNTATNLGDPFFYGKGVINVESALQ

SEQ ID NO: 192 - protein, 275 aa, artificial sequence
  LG12-clade protease variant
AQTVPWGIPHIKADKAHAAGVTGSGVKVAILDTGIDANHADLNVKGGASFVTGEPNALQDGNGHGTHVAGTVAALNNTTGVLGVAYNADLYAVKVLSASGSGTLSGIAQGIEWSISNGMNVINMSLGGSSGSTALQQACNNAYNRGIVGIAAAGNNGSDGNRNTMHYPARYSSVIAVGAVSSNNTRASFSSVGSELEVMAPGVNILSTTPGNNYASRNGTSMAAPHVAGAAALIKAKYPSMTNVQIRERLKNTATNLGDPFFYGKGVINVESALQ

SEQ ID NO: 193 - protein, 275 aa, artificial sequence
  LG12-clade protease variant
AQTVPWGIPHIKADKAHAAGVTGSGVSVAILDTGIDANHADLNVKGGASFVSEEPNALQDGNGHGTHVAGTVAALNNTTGVLGVAYNADLYAVKVLSASGSGTLSGIAQGIEWSISNGMNVINMSLGGSSGSTALQQACNNAYNRGIVVIAAAGNSGSDGNRNTMGYPARYSSVIAVGAVSSNNTRASFSSVGSELEVMAPGVNILSTTPGNNYASFNGTSMAAPHVAGAAALIKAKYPSMTNVQIRERLKNTATPLGDPFFYGKGVINVESALQ

SEQ ID NO: 194 - protein, 275 aa, artificial sequence
  LG12-clade protease variant
AQTVPWGIPHIKADKAHAAGVTGSGVKVAILDTGIDANHADLNVQGGASFVSEEPNALQDGNGHGTHVAGTVAALNNTTGVLGVAYNADLYAVKVLSASGSGTLSGIAQGIEWSISNGMNVINMSLGGSSGSTALQQACNNAYNRGIVVIAAAGNSGSDGNRNTMGYPARYSSVIAVGAVSSNNTRASFSSVGSELEVMAPGVNILSTTPGNNYASFNGTSMAAPHVAGAAALIKAKYPSMTNVQIRERLKNTATPLGDPFFYGKGVINVESALQ

SEQ ID NO: 195 - protein, 272 aa, artificial sequence
  LG12-clade protease variant
AQTVPWGIPHIKADKAHAAGVTGSGVKVAILDTGIDANHADLNVKGGASFVSGEPQDGNGHGTHVAGTVAALNNTTGVLGVAYNADLYAVKVLSASGSGTLSGIAQGIEWSISNGMNVINMSLGGSSGSTALQQACNNAYNRGIVVIAAAGNSGSSGNRNTMGYPARYSSVIAVGAVSSNNTRASFSSVGSELEVMAPGVNILSTTPGNNYASFNGTSMAAPHVAGAAALIKAKYPSMTNVQIRERLKNTATNLGDPFFYGKGVINVESALQ

SEQ ID NO: 196 - protein, 275 aa, artificial sequence
  LG12-clade protease variant
AQTVPWGITHIKADKAHAAGVTGSGVKVAILDTGIDANHADLNVRGGESFVSGEPNALQDGNGHGTHVAGTVAALNNATGVLGVAYNADLYAVKVLSASGSGTLSGIAQGIEWSISNGMNVINMSLGNSSGSTALQQACDNAYNRGIVVIAAAGNSGVSGNRNTMGYPARYSSVIAVGAVNSNNTRASFSSVGPELEVMAPGVNILSTVPGNNYASFNGTSMAAPHVAGAAALIKAKYPSMTNVAIRERLKNTATPLGDPFFYGKGVINVEQALQ

SEQ ID NO: 197 - protein, 274 aa, artificial sequence
  LG12-clade protease variant
AQTVPWGIPHIKADKAHAAGVTGSGVKVAILDTGIDANHADLNVKGGASFVSEPNALQDGNGHGTHVAGTVAALNNTTGVLGVAYNADLYAVKVLSASGSGTLSGIAQGIEWSISNGMNVINMSLGGSSGSTALQQACNNAYNRGIVVIAAAGNSGSSGNRNTMGYPARYSSVIAVGAVSSNNTRASFSSVGSELEVMAPGVNILSTTPGNNYASFNGTSMAAPHVAGAAALIKAKYPSMTNVQIRERLKNTATNLGDPFFYGKGVINVESALQ

SEQ ID NO: 198 - protein, 274 aa, artificial sequence
  LG12-clade protease variant
AQTVPWGIPHIKADKAHAAGVTGSGVKVAILDTGIDANHADLNVKGGASFVSGENALQDGNGHGTHVAGTVAALNNTTGVLGVAYNADLYAVKVLSASGSGTLSGIAQGIEWSISNGMNVINMSLGGSSGSTALQQACNNAYNRGIVVIAAAGNSGSSGNRNTMGYPARYSSVIAVGAVSSNNTRASFSSVGSELEVMAPGVNILSTTPGNNYASFNGTSMAAPHVAGAAALIKAKYPSMTNVQIRERLKNTATNLGDPFFYGKGVINVESALQ

SEQ ID NO: 199 - protein, 274 aa, artificial sequence
  LG12-clade protease variant
AQTVPWGIPHIKADKAHAAGVTGSGVKVAILDTGIDANHADLNVKGGASFVSGEPNLQDGNGHGTHVAGTVAALNNTTGVLGVAYNADLYAVKVLSASGSGTLSGIAQGIEWSISNGMNVINMSLGGSSGSTALQQACNNAYNRGIVVIAAAGNSGSSGNRNTMGYPARYSSVIAVGAVSSNNTRASFSSVGSELEVMAPGVNILSTTPGNNYASFNGTSMAAPHVAGAAALIKAKYPSMTNVQIRERLKNTATNLGDPFFYGKGVINVESALQ

SEQ ID NO: 200 - protein, 275 aa, artificial sequence
  LG12-clade protease variant
AQTVPWGIPHIKADKAHAAGVTGSGVKVAILDTGIDANHADLNVKGGASFVSGEPNALQDGNGHGTHVAGTVAALNNTTGVLGVAYNADLYAVKVLSASGSGTLSGIAQGIEWSISNGMNVINMSLGGSSGSTALQQACNNAYNRGIVVIAAAGNSGSDGNRNTMDYPARYSSVIAVGAVSENNTRASFSSVGSELEVMAPGVNILSTTPGNNYASRNGTSMAAPHVAGAAALIKAKYPSMTNVQIRERLKNTATNLGDPFFYGKGVINVESALQ

SEQ ID NO: 201 - protein, 274 aa, artificial sequence
  LG12-clade protease variant
AQTVPWGIPHIKADKAHAAGVTGSGVKVAILDTGIDANHADLNVKGGASFVSGEPNAQDGNGHGTHVAGTVAALNNTTGVLGVAYNADLYAVKVLSASGSGTLSGIAQGIEWSISNGMNVINMSLGGSSGSTALQQACNNAYNRGIVVIAAAGNSGSSGNRNTMGYPARYSSVIAVGAVSSNNTRASFSSVGSELEVMAPGVNILSTTPGNNYASFNGTSMAAPHVAGAAALIKAKYPSMTNVQIRERLKNTATNLGDPFFYGKGVINVESALQ

SEQ ID NO: 202 - protein, 275 aa, artificial sequence
  LG12-clade protease variant
AQTVPWGIPHIKADKAHAAGVTGSGVKVAILDTGIDANHADLNVKGGASFVSGEPNALQDGNGHGTHVAGTVAALNNTTGVLGVAYNADLYAVKVLSASASGTLSGIAQGIEWSISNGMNVINMSLGHFSGSTALQQACNNAYNRGIVVIAAAGNSGSSGNRNTMGYPARYSSVIAVGAVSSNNTRASFSSVGSELEVMAPGVNILSTTPGNNYASFNGTSMAAPHVAGAAALIKAKYPSMTNVQIRERLKNTATNLGDPFFYGKGVINVEKALQ

SEQ ID NO: 203 - protein, 275 aa, artificial sequence
  LG12-clade protease variant
AQTVPWGIPHIKADKAHAAGVTGSGVKVAILDTGIDAQHADLNVKGGASFVTGEPNALQDGNGHGTHVAGTVAALNNTTGVLGVAYNADLYAVKVLSASASGTLSGIAQGIEWSISSRMNVINMSLGHSSGSTALQQACNNAYNRGIVVIAAAGNSGSSGNRNTMGYPARYSSVIAVGAVSSNNTRASFSSVGSELEVMAPGVNILSTTPGNNYASFNGTSMAAPHVAGAAALIKAKYPSMTNVQIRERLKNTATNLGDPFFYGKGVINVESALQ

SEQ ID NO: 204 - protein, 275 aa, artificial sequence
  LG12-clade protease variant
AQTVPWGIPHIKADKAHAAGVTGSGVKVAILDTGIDANHDDLNVKGGASFVQGEPNALQDGNGHGTHVAGTVAALNNTTGVLGVAYNADLYAVKVLSASGSGTLSGIAQGIEWSISNRMNVINMSLGMSYGSTALQQACNNAYNRGIVVIAAAGNSGSSGNRNTMHYPARYSSVIAVGAVSSNNTRASFSSVGSELEVMAPGVNILSTTPGNNYASFNGTSMAAPHVAGAAALIKAKFPSMTNVQIRERLKNTATNLGDPFFYGKGVIKCGKVLY

SEQ ID NO: 205 - protein, 275 aa, artificial sequence
  LG12-clade protease variant
AQTVPWGIPHIKADKAHAAGVTGSGVKVAILDTGIDANHDDLNVKGGASFVTGEPNALQDGNGHGTHVAGTVAALDNTTGVLGVAYNADLYAVKVLSASGSGTLSGIAQGIEWSISNGMNVINMSLGMFYGSTALQQACNNAYNRGIVVIAAAGNSGSSGNRNTMHYPARYSSVIAVGAVSSNNTRASFSSVGSELEVMAPGVNILSTTPGNNYASFNGTSMAAPHVAGAAALIKAKYPSMTNVQIRERLKNTATNLGDPFFYGKGVINVESALQ

SEQ ID NO: 206 - protein, 275 aa, artificial sequence
  LG12-clade protease variant
AQTVPWGIPHIKADKAHAAGVTGSGVKVAILDTGIDANHADLNVKGGASFVTGEPNALQDGNGHGTHVAGTVAALDNTTGVLGVAYNADLYAVKVLSASGSGTLSGIAQGIEWSISNGMNVINMSLGSFFGSTALQQACNNAYNRGIVVIAAAGNSGSSGNRNTMGYPARYSSVIAVGAVSSNNTRASFSSVGSELEVMAPGVNILSTTPGNNYASFNGTSMAAPHVAGAAALIKAKYPSMTNVQIRERLKNTATNLGDPFFYGKGVINVESALQ

SEQ ID NO: 207 - protein, 275 aa, artificial sequence
  LG12-clade protease variant
AQTVPWGIPHIKADKAHAAGVTGSGVKVAILDTGIDANHADLNVKGGASFVTGEPNALQDGNGHGTHVAGTVAALNNTTGVLGVAYNADLYAVKVLSASGSGTLSGIAQGIEWSISNGMNVINMSLGGFSGSTALQQACNNAYNRGIVVIAAAGNSGSSGNRNTMGYPARYSSVIAVGAVSSNNTRASFSSVGSELEVMAPGVNILSTTPGNNYASFNGTSMAAPHVAGAAALIKAKYPSMTNVQIRERLKNTATNLGDPFFYGKGVINVESALQ

SEQ ID NO: 208 - protein, 275 aa, artificial sequence
  LG12-clade protease variant
AQTVPWGIPHIKADKAHAAGVTGSGVKVAILDTGIDANHADLNVKGGASFVSGEPNALQDGNGHGTHVAGTVAALDNTTGVLGVAYNADLYAVKVLSASGSGTLSGIAQGIEWSISNRMNVINMSLGMFFGSTALQQACNNAYNRGIVVIAAAGNSGSSGNRNTMGYPARYSSVIAVGAVSSNNTRASFSSVGSELEVMAPGVNILSTTPGNNYASFNGTSMAAPHVAGAAALIKAKFPSMTNVQIRERLKNTATNLGDPFFYGKGVINVESALQ

SEQ ID NO: 209 - protein, 275 aa, artificial sequence
  LG12-clade protease variant
AQTVPWGIPHIKADKAHAAGVTGSGVKVAILDTGIDANHDDLNVKGGASFVQGEPNALQDGNGHGTHVAGTVAALDNTTGVLGVAYNADLYAVKVLSASGSGTLSGIAQGIEWSISNGMNVINMSLGSFYGSTALQQACNNAYNRGIVVIAAAGNSGSSGNRNTMGYPARYSSVIAVGAVSSNNTRASFSSVGSELEVMAPGVNILSTTPGNNYASFNGTSMAAPHVAGAAALIKAKFPSMTNVQIRERLKNTATNLGDPFFYGKGVINVESALQ

SEQ ID NO: 210 - protein, 275 aa, artificial sequence
  LG12-clade protease variant
AQTVPWGIPHIKADKAHAAGVTGSGVMVAILDTGIDANHADLNVKGGASFVSYEPNALQDGNGHGTHVAGTVAALNNTTGVLGVAYNADLYAVKVLSASGSGTLSGIAQGIEWSISNGMNVINMSLGDRIGSTALQQACNNAYNRGIVVIAAAGNSGSSGNRNTMDYPARYSSVIAVGAVSSNNTRASFSSVGSELEVMAPGVNILSTTPGNNYASRNGTSMAAPHVAGAAALIKAKYPSMTNVQIRKRLKNTATELGDPFFYGKGVINVEKALQ

SEQ ID NO: 211 - protein, 275 aa, artificial sequence
  LG12-clade protease variant
AQTVPWCIPHIKADKAHAAGVTGSGVKVAILDTGIDANHADLNVKGGASFVTGEPNALQDGNGHGTHVAGTVAALDNTTGVLGVAYNADLYAVKVLSASGSGTLSGIAQGIEWSISNGMNVINMSLGDRIGSTALQQACNNAYNRGIVVIAAAGNNGSSGNRNTMDYPARYSSVIAVGAVSSNNTRASFSSVGSELEVMAPGVNILSTTPGNNYASRNGTSMAAPHVAGAAALIKAKYPSMTNVQIRERLKNTATNLGDPFFYGKGVINVEKALQ

SEQ ID NO: 212 - protein, 275 aa, artificial sequence
  LG12-clade protease variant
AQTVPWGIPHIKADKAHAAGVTGSGVKVAILDTGIDANHADLNVKGGASFVSGEPNALQDGNGHGTHVAGTVAALNNTTGVLGVAYNADLYAVKVLSASGSGTLSGIAQGIEWSISNGMNVINMSLGDRIGSTALQQACNNAYNRGIVVIAAAGNTGSSGNRNTMDYPARYSSVIAVGAVSSNNTRASFSSVGSELEVMAPGVNILSTTPGNNYASRNGTSMAAPHVAGAAALIKAKYPSMTNVQIRERLKNTATNLGDPFFYGKGVINVEKALQ

SEQ ID NO: 213 - protein, 275 aa, artificial sequence
  LG12-clade protease variant
AQTVPWGIPHIKADKAHAAGVTGSGVKVAILDTGIDANHADLNVKGGASFVSGEPNALQDGNGHGTHVAGTVAALNNTTGVLGVAYNADLYAVKVLSASGSGTLSGIAQGIEWSISNGMNVINMSLGDRIGSTALQQACNNAYNRGIVVIAAAGNSGSSGNRNTMHYPARYSSVIAVGAVSSNNTRASFSSVGSELEVMAPGVNILSTTPGNNYASRNGTSMAAPHVAGAAALIKAKYPSMTNVQIRERLKNTATNLGDPFFYGKGVINVEKALQ

SEQ ID NO: 214 - protein, 275 aa, artificial sequence
  LG12-clade protease variant
AQTVPWGIPHIKADKAHAAGVTGSGVKVAILDTGIDANHADLNVKGGASFVSDEPNALQDGNGHGTHVAGTVAALNNTTGVLGVAYNADLYAVKVLSASGSGTLSGIAQGIEWSISNRMNVINMSLGDRIGSTALQQACNNAYNRGIVVIAAAGNNGSSGNRNTMDYPARYSSVIAVGAVSSNNTRASFSSVGSELEVMAPGVNILSTTPGNNYASRNGTSMAAPHVAGAAALIKAKYPSMTNVQIRKRLKNTATNLGDPFFYGKGVINVESALQ

SEQ ID NO: 215 - protein, 275 aa, artificial sequence
  LG12-clade protease variant
AQTVPWGIPHIKADKAHAAGVTGSGVKVAILDTGIDANHADLNVKGGASFVTYEPNALQDGNGHGTHVAGTVAALDNTTGVLGVAYNADLYAVKVLSASGSGTLSGIAQGIEWSISNRMNVINMSLGDFYGSTALQQACNNAYNRGIVVIAAAGNNGSSGNRNTMDYPARYSSVIAVGAVSSNNTRASFSSVGSELEVMAPGVNILSTTPGNNYASRNGTSMAAPHVAGAAALIKAKYPSMTNVQIRERLKNTATELGDPFFYGKGVINVEKALQ

SEQ ID NO: 216 - protein, 275 aa, artificial sequence
  LG12-clade protease variant
AQTVPWGIPHIKADKAHAAGVTGSGVKVAILDTGIDANHADLNVKGGASFVTDEPNALQDGNGHGTHVAGTVAALDNTTGVLGVAYNADLYAVKVLSASGSGTLSGIAQGIEWSISNGMNVINMSLGDFYGSTALQQACNNAYNRGIVVIAAAGNNGSSGNRNTMGYPARYSSVIAVGAVSSNNTRASFSSVGSELEVMAPGVNILSTTPGNNYASRNGTSMAAPHVAGAAALIKAKYPSMTNVQIRERLKNTATELGDPFFYGKGVINVEKALQ

SEQ ID NO: 217 - protein, 275 aa, artificial sequence
  LG12-clade protease variant
AQTVPWGIPHIKADKAHAAGVTGSGVKVAILDTGIDANHADLNVKGGASFVFGEPNALQDGNGHGTHVAGTVAALDNTTGVLGVAYNADLYAVKVLSASGSGTLSGIAQGIEWSISNRMNVINMSLGDFYGSTALQQACNNAYNRGIVVIAAAGNNGSSGNRNTMDYPARYSSVIAVGAVSSNNTRASFSSVGSELEVMAPGVNILSTTPGNNYASRNGTSMAAPHVAGAAALIKAKYPSMTNVQIRNRLKNTATNLGDPFFYGKGVINVEKALQ

SEQ ID NO: 218 - protein, 275 aa, artificial sequence
  LG12-clade protease variant
AQTVPWGIPHIKADKAHAAGVTGSGVKVAILDTGIDANHADLNVKGGASFVFYEPNALQDGNGHGTHVAGTVAALDNTTGVLGVAYNADLYAVKVLSASGSGTLSGIAQGIEWSISNRMNVINMSLGDFYGSTALQQACNNAYNRGIVVIAAAGNNGSSGNRNTMDYPARYSSVIAVGAVSSNNTRASFSSVGSELEVMAPGVNILSTTPGNNYASRNGTSMAAPHVAGAAALIKAKYPSMTNVQIRNRLKNTATELGDPFFYGKGVINVEKALQ

SEQ ID NO: 219 - protein, 275 aa, artificial sequence
  LG12-clade protease variant
AQTVPWGIPHIKADKAHAAGVTGSGVKVAILDTGIDANHADLNVKGGASFVFGEPNALQDGNGHGTHVAGTVAALDNTTGVLGVAYNADLYAVKVLSASGSGTLSGIAQGIEWSISNRMNVINMSLGDFYGSTALQQACNNAYNRGIVVIAAAGNSGSSGNRNTMDYPARYSSVIAVGAVSSNNTRASFSSVGSELEVMAPGVNILSTTPGNNYASRNGTSMAAPHVAGAAALIKAKYPSMTNVQIRNRLKNTATNLGDPFFYGKGVINVESALQ

SEQ ID NO: 220 - protein, 275 aa, artificial sequence
  LG12-clade protease variant
AQTVPWGIPHIKADKAHAAGVTGSGVKVAILDTGIDANHADLNVKGGASFVSGEPNALQDGNGHGTHVAGTVAALDNTTGVLGVAYNADLYAVKVLSASGSGTLSGIAQGIEWSISNRMNVINMSLGDFYGSTALQQACNNAYNRGIVVIAAAGNSGSSGNRNTMDYPARYSSVIAVGAVSSNNTRASFSSVGSELEVMAPGVNILSTTPGNNYASRNGTSMAAPHVAGAAALIKAKYPSMTNVQIRNRLKNTATELGDPFFYGKGVINVEKALQ

SEQ ID NO: 221 - protein, 275 aa, artificial sequence
  LG12-clade protease variant
AQTVPWGIPHIKADKAHAAGVTGSGVKVAILDTGIDANHADLNVKGGASFVSGEPNALQDGNGHGTHVAGTVAALDNTTGVLGVAYNADLYAVKVLSASGSGTLSGIAQGIEWSISNRMNVINMSLGDFYGSTALQQACNNAYNRGIVVIAAAGNSGSSGNRNTMDYPARYSSVIAVGAVSSNNTRASFSSVGSELEVMAPGVNILSTTPGNNYASRNGTSMAAPHVAGAAALIKAKYPSMTNVQIRNRLKNTATELGDPFFYGKGVINVESALQ

SEQ ID NO: 222 - protein, 275 aa, artificial sequence
  LG12-clade protease variant
AQTVPWGIPHIKADKAHAAGVTGSGVKVAILDTGIDANHADLNVKGGASFVSGEPNALQDGNGHGTHVAGTVAALDNTTGVLGVAYNADLYAVKVLSASGSGTLSGIAQGIEWSISNRMNVINMSLGDFYGSTALQQACNNAYNRGIVVIAAAGNNGSSGNRNTMDYPARYSSVIAVGAVSSNNTRASFSSVGSELEVMAPGVNILSTTPGNNYASRNGTSMAAPHVAGAAALIKAKYPSMTNVQIRNRLKNTATNLGDPFFYGKGVINVESALQ

SEQ ID NO: 223 - protein, 275 aa, artificial sequence
  LG12-clade protease variant
AQTVPWGIPHIKADKAHAAGVTGSGVKVAILDTGIDANHADLNVKGGASFVTGEPNALQDGNGHGTHVAGTVAALDNTTGVLGVAYNADLYAVKVLSASGSGTLSGIAQGIEWSISNRMNVINMSLGDFYGSTALQQACNNAYNRGIVVIAAAGNSGSSGNRNTMDYPARYSSVIAVGAVSSNNTRASFSSVGSELEVMAPGVNILSTTPGNNYASRNGTSMAAPHVAGAAALIKAKYPSMTNVQIRNRLKNTATNLGDPFFYGKGVINVEKALQ

SEQ ID NO: 224 - protein, 275 aa, artificial sequence
  LG12-clade protease variant
AQTVPWGIPHIKADKAHAAGVTGSGVKVAILDTGIDANHADLNVKGGASFVSGEPNALQDGNGHGTHVAGTVAALDNTTGVLGVAYNADLYAVKVLSASGSGTLSGIAQGIEWSISNRMNVINMSLGDFYGSTALQQACNNAYNRGIVVIAAAGNNGSSGNRNTMDYPARYSSVIAVGAVSSNNTRASFSSVGSELEVMAPGVNILSTTPGNNYASRNGTSMAAPHVAGAAALIKAKYPSMTNVQIRNRLKNTATNLGDPFFYGKGVINVEKALQ

SEQ ID NO: 225 - protein, 275 aa, artificial sequence
  LG12-clade protease variant
AQTVPWGIPHIKADKAHAAGVTGSGVKVAILDTGIDANHADLNVKGGASFVTYEPNALQDGNGHGTHVAGTVAALDNTTGVLGVAYNADLYAVKVLSASGSGTLSGIAQGIEWSISNRMNVINMSLGDFYGSTALQQACNNAYNRGIVVIAAAGNNGSSGNRNTMDYPARYSSVIAVGAVSSNNTRASFSSVGSELEVMAPGVNILSTTPGNNYASFNGTSMAAPHVAGAAALIKAKYPSMTNVQIRNRLKNTATNLGDPFFYGKGVINVESALQ

SEQ ID NO: 226 - protein, 275 aa, artificial sequence
  LG12-clade protease variant
AQTVPWGIPHIKADKAHAAGVTGSGVKVAILDTGIDANHADLNVKGGASFVFGEPNALQDGNGHGTHVAGTVAALDNTTGVLGVAYNADLYAVKVLSASGSGTLSGIAQGIEWSISNRMNVINMSLGDFYGSTALQQACNNAYNRGIVVIAAAGNSGSSGNRNTMDYPARYSSVIAVGAVSSNNTRASFSSVGSELEVMAPGVNILSTTPGNNYASRNGTSMAAPHVAGAAALIKAKYPSMTNVQIRNRLKNTATELGDPFFYGKGVINVEKALQ

SEQ ID NO: 227 - protein, 275 aa, artificial sequence
  LG12-clade protease variant
AQTVPWGIPHIKADKAHAAGVTGSGVKVAILDTGIDANHADLNVKGGASFVFGEPNALQDGNGHGTHVAGTVAALDNTTGVLGVAYNADLYAVKVLSASGSGTLSGIAQGIEWSISNRMNVINMSLGDFYGSTALQQACNNAYNRGIVVIAAAGNSGSSGNRNTMDYPARYSSVIAVGAVSSNNTRASFSSVGSELEVMAPGVNILSTTPGNNYASRNGTSMAAPHVAGAAALIKAKYPSMTNVQIRNRLKNTATELGDPFFYGKGVINVESALQ

SEQ ID NO: 228 - protein, 275 aa, artificial sequence
  LG12-clade protease variant
AQTVPWCIPHIKADKAHAAGVTGSGVKVAILDTGIDANHADLNVKGGASFVTDEPNALQDGNGHGTHVAGTVAALDNTTGVLGVAYNADLYAVKVLSASGSGTLSGIAQGIEWSISNRMNVINMSLGDFYGSTALQQACNNAYNRGIVVIAAAGNSGSSGNRNTMDYPARYSSVIAVGAVSSNNTRASFSSVGSELEVMAPGVNILSTTPGNNYASRNGTSMAAPHVAGAAALIKAKYPSMTNVQIRNRLKNTATELGDPFFYGKGVINVESALQ

SEQ ID NO: 229 - protein, 275 aa, artificial sequence
  LG12-clade protease variant
AQTVPWGIPHIKADKAHAAGVTGSGVKVAILDTGIDANHADLNVKGGASFVFYEPNALQDGNGHGTHVAGTVAALDNTTGVLGVAYNADLYAVKVLSASGSGTLSGIAQGIEWSISNRMNVINMSLGDFYGSTALQQACNNAYNRGIVVIAAAGNSGSSGNRNTMDYPARYSSVIAVGAVSSNNTRASFSSVGSELEVMAPGVNILSTTPGNNYASFNGTSMAAPHVAGAAALIKAKYPSMTNVQIRNRLKNTATELGDPFFYGKGVINVEKALQ

SEQ ID NO: 230 - protein, 275 aa, artificial sequence
  LG12-clade protease variant
AQTVPWGIPHIKADKAHAAGVTGSGVKVAILDTGIDANHADLNVKGGASFVSGEPNALQDGNGHGTHVAGTVAALDNTTGVLGVAYNADLYAVKVLSASGSGTLSGIAQGIEWSISNRMNVINMSLGDFYGSTALQQACNNAYNRGIVVIAAAGNNGSSGNRNTMDYPARYSSVIAVGAVSSNNTRASFSSVGSELEVMAPGVNILSTTPGNNYASFNGTSMAAPHVAGAAALIKAKYPSMTNVQIRNRLKNTATNLGDPFFYGKGVINVEKALQ

SEQ ID NO: 231 - protein, 275 aa, artificial sequence
  LG12-clade protease variant
AQTVPWGIPHIKADKAHAAGVTGSGVKVAILDTGIDANHADLNVKGGASFVFYEPNALQDGNGHGTHVAGTVAALNNTTGVLGVAYNADLYAVKVLSASGSGTLSGIAQGIEWSISNRMNVINMSLGDFYGSTALQQACNNAYNRGIVVIAAAGNNGSSGNRNTMDYPARYSSVIAVGAVSSNNTRASFSSVGSELEVMAPGVNILSTTPGNNYASFNGTSMAAPHVAGAAALIKAKYPSMTNVQIRNRLKNTATELGDPFFYGKGVINVEKALQ

SEQ ID NO: 232 - protein, 275 aa, artificial sequence
  LG12-clade protease variant
AQTVPWGIPHIKADKAHAAGVTGSGVKVAILDTGIDANHADLNVKGGASFVSDEPNALQDGNGHGTHVAGTVAALDNTTGVLGVAYNADLYAVKVLSASGSGTLSGIAQGIEWSISNRMNVINMSLGDFYGSTALQQACNNAYNRGIVVIAAAGNSGSSGNRNTMDYPARYSSVIAVGAVSSNNTRASFSSVGSELEVMAPGVNILSTTPGNNYASFNGTSMAAPHVAGAAALIKAKYPSMTNVQIRNRLKNTATNLGDPFFYGKGVINVEKALQ

SEQ ID NO: 233 - protein, 275 aa, artificial sequence
  LG12-clade protease variant
AQTVPWGIPHIKADKAHAAGVTGSGVKVAILDTGIDANHADLNVKGGASFVFGEPNALQDGNGHGTHVAGTVAALDNTTGVLGVAYNADLYAVKVLSASGSGTLSGIAQGIEWSISNRMNVINMSLGDFYGSTALQQACNNAYNRGIVVIAAAGNSGSSGNRNTMDYPARYSSVIAVGAVSSNNTRASFSSVGSELEVMAPGVNILSTTPGNNYASRNGTSMAAPHVAGAAALIKAKYPSMTNVQIRNRLKNTATNLGDPFFYGKGVINVESALR

SEQ ID NO: 234 - protein, 275 aa, artificial sequence
  LG12-clade protease variant
AQTVPWGIPHIKADKAHAAGVTGSGVKVAILDTGIDANHADLNVKGGASFVFGEPNALQDGNGHGTHVAGTVAALDNTTGVLGVAYNADLYAVKVLSASGSGTLSGIAQGIEWSISNRMNVINMSLGDFYGSTALQQACNNAYNRGIVVIAAAGNSGSSGNRNTMDYPARYSSVIAVGAVSSNNTRASFSSVGSELEVMAPGVNILSTTPGNNYASRNGTSMAAPHVAGAAALIKAKYPSMTNVQIRNRLKNTATRLGDPFFYGKGVINVESALQ

SEQ ID NO: 235 - protein, 275 aa, artificial sequence
  LG12-clade protease variant
AQTVPWGIPHIKADKAHAAGVTGSGVKVAILDTGIDANHADLNVKGGASFVFGEPNALQDGNGHGTHVAGTVAALDNTTGVLGVAYNADLYAVKVLSASGSGTLSGIAQGIEWSISNRMNVINMSLGDFYGSTALQQACNNAYNRGIVVIAAAGNSGSSGNRNTMDYPARYSSVIAVGAVSSNNTRASFSSVGSELEVMAPGVNILSTTPGNNYASRNGTSMAAPHVAGAAALIKAKYPSMTNVQIRNRLKNTATRLGDPFFYGKGVINVEKALQ

SEQ ID NO: 236 - protein, 275 aa, artificial sequence
  LG12-clade protease variant
AQTVPWGIPHIKADKAHAAGVTGSGVKVAILDTGIDANHADLNVKGGASFVFGEPNALQDGNGHGTHVAGTVAALDNTTGVLGVAYNADLYAVKVLSASGSGTLSGIAQGIEWSISNRMNVINMSLGDFYGSTALQQACNNAYNRGIVVIAAAGNSGSSGNRNTMDYPARYSSVIAVGAVSSNNTRASFSSVGSELEVMAPGVNILSTTPGNNYASRNGTSMAAPHVAGAAALIKAKYPSMTNVQIRNRLKNTATNLGDPFFYGKGVINVEKALQ

SEQ ID NO: 237 - protein, 275 aa, artificial sequence
  LG12-clade protease variant
AQTVPWGIPHIKADKAHAAGVTGSGVKVAILDTGIDANHADLNVKGGASFVFYEPNALQDGNGHGTHVAGTVAALDNTTGVLGVAYNADLYAVKVLSASGSGTLSGIAQGIEWSISNRMNVINMSLGDFYGSTALQQACNNAYNRGIVVIAAAGNSGSSGNRNTMDYPARYSSVIAVGAVSSNNTRASFSSVGSELEVMAPGVNILSTTPGNNYASRNGTSMAAPHVAGAAALIKAKYPSMTNVQIRNRLKNTATNLGDPFFYGKGVINVEKALQ

SEQ ID NO: 238 - protein, 275 aa, artificial sequence
  LG12-clade protease variant
AQTVPWGIPHIKADKAHAAGVTGSGVKVAILDTGIDANHADLNVKGGASFVFGEPNALQDGNGHGTHVAGTVAALDNTTGVLGVAYNADLYAVKVLSASGSGTLSGIAQGIEWSISNRMNVINMSLGDFYGSTALQQACNNAYNRGIVVIAAAGNSGSSGNRNTMHYPARYSSVIAVGAVSSNNTRASFSSVGSELEVMAPGVNILSTTPGNNYASRNGTSMAAPHVAGAAALIKAKYPSMTNVQIRNRLKNTATELGDPFFYGKGVINVEKALQ

SEQ ID NO: 239 - protein, 275 aa, artificial sequence
  LG12-clade protease variant
AQTVPWGIPHIKADKAHAAGVTGSGVKVAILDTGIDANHADLNVKGGASFVTYEPNALQDGNGHGTHVAGTVAALDNTTGVLGVAYNADLYAVKVLSASGSGTLSGIAQGIEWSISNRMNVINMSLGDFYGSTALQQACNNAYNRGIVVIAAAGNNGSSGNRNTMDYPARYSSVIAVGAVSSNNTRASFSSVGSELEVMAPGVNILSTTPGNNYASFNGTSMAAPHVAGAAALIKAKYPSMTNVQIRNRLKNTATNLGDPFFYGKGVINVEKALQ

SEQ ID NO: 240 - protein, 275 aa, artificial sequence
  LG12-clade protease variant
AQTVPWGIPHIKADKAHAAGVTGSGVKVAILDTGIDANHADLNVKGGASFVTGEPNALQDGNGHGTHVAGTVAALDNTTGVLGVAYNADLYAVKVLSASGSGTLSGIAQGIEWSISNRMNVINMSLGDFYGSTALQQACNNAYNRGIVVIAAAGNNGSSGNRNTMDYPARYSSVIAVGAVSSNNTRASFSSVGSELEVMAPGVNILSTTPGNNYASFNGTSMAAPHVAGAAALIKAKYPSMTNVQIRNRLKNTATELGDPFFYGKGVINVEKALQ

SEQ ID NO: 241 - protein, 275 aa, artificial sequence
  LG12-clade protease variant
AQTVPWGIPHIKADKAHAAGVTGSGVKVAILDTGIDANHADLNVKGGASFVSGEPNALQDGNGHGTHVAGTVAALDNTTGVLGVAYNADLYAVKVLSASGSGTLSGIAQGIEWSISNRMNVINMSLGDFYGSTALQQACNNAYNRGIVVIAAAGNNGSSGNRNTMDYPARYSSVIAVGAVSSNNTRASFSSVGSELEVMAPGVNILSTTPGNNYASFNGTSMAAPHVAGAAALIKAKYPSMTNVQIRNRLKNTATRLGDPFFYGKGVINVESALQ

SEQ ID NO: 242 - protein, 275 aa, artificial sequence
  LG12-clade protease variant
AQTVPWGIPHIKADKAHAAGVTGSGVKVAILDTGIDANHADLNVKGGASFVTGEPNALQDGNGHGTHVAGTVAALDNTTGVLGVAYNADLYAVKVLSASGSGTLSGIAQGIEWSISNRMNVINMSLGDFYGSTALQQACNNAYNRGIVVIAAAGNNGSSGNRNTMHYPARYSSVIAVGAVSSNNTRASFSSVGSELEVMAPGVNILSTTPGNNYASRNGTSMAAPHVAGAAALIKAKYPSMTNVQIRNRLKNTATRLGDPFFYGKGVINVESALQ

SEQ ID NO: 243 - protein, 275 aa, artificial sequence
  LG12-clade protease variant
AQTVPWGIPHIKADKAHAAGVTGSGVKVAILDTGIDANHADLNVKGGASFVFGEPNALQDGNGHGTHVAGTVAALDNTTGVLGVAYNADLYAVKVLSASGSGTLSGIAQGIEWSISNRMNVINMSLGDFYGSTALQQACNNAYNRGIVVIAAAGNNGSSGNRNTMDYPARYSSVIAVGAVSSNNTRASFSSVGSELEVMAPGVNILSTTPGNNYASFNGTSMAAPHVAGAAALIKAKYPSMTNVQIRNRLKNTATNLGDPFFYGKGVINVEKALQ

SEQ ID NO: 244 - protein, 275 aa, artificial sequence
  LG12-clade protease variant
AQTVPWGIPHIKADKAHAAGVTGSGVKVAILDTGIDANHADLNVKGGASFVSGEPNALQDGNGHGTHVAGTVAALDNTTGVLGVAYNADLYAVKVLSASGSGTLSGIAQGIEWSISNRMNVVNMSLGDFYGSTALQQACNNAYNRGIVVIAAAGNSGSSGNRNTMDYPARYSSVIAVGAVSSNNTRASFSSVGSELEVMAPGVNILSTTPGNNYASRNGTSMAAPHVAGAAALIKAKYPSMTNVQIRNRLKNTATNLGDPFFYGKGVINVESALQ

SEQ ID NO: 245 - protein, 275 aa, artificial sequence
  LG12-clade protease variant
AQTVPWGIPHIKADKAHAAGVTGSGVKVAILDTGIDANHADLNVKGGASFVTGEPNALQDGNGHGTHVAGTVAALDNTTGVLGVAYNADLYAVKVLSASGSGTLSGIAQGIEWSISNRMNVINMSLGDFYGSTALQQACNNAYNRGIVVIAAAGNSGSSGNRNTMDYPARYSSVIAVGAVSSNNTRASFSSVGSELEVMAPGVNILSTTPGNNYASRNGTSMAAPHVAGAAALIKAKYPSMTNVQIRNRLKNTATRLGDPFFYGKGVINVESALQ

SEQ ID NO: 246 - protein, 275 aa, artificial sequence
  LG12-clade protease variant
AQTVPWGIPHIKADKAHAAGVTGSGVKVAILDTGIDANHADLNVKGGASFVFYEPNALQDGNGHGTHVAGTVAALDNTTGVLGVAYNADLYAVKVLSASGSGTLSGIAQGIEWSISNRMNVINMSLGDFYGSTALQQACNNAYNRGIVVIAAAGNSGSSGNRNTMDYPARYSSVIAVGAVSSNNTRASFSSVGSELEVMAPGVNILSTTPGNNYASRNGTSMAAPHVAGAAALIKAKYPSMTNVQIRNRLKNTATELGDPFFYGKGVINVESALQ

SEQ ID NO: 247 - protein, 275 aa, artificial sequence
  LG12-clade protease variant
AQTVPWGIPHIKADKAHAAGVTGSGVKVAILDTGIDANHADLNVKGGASFVFGEPNALQDGNGHGTHVAGTVAALDNTTGVLGVAYNADLYAVKVLSASGSGTLSGIAQGIEWSISNRMNVINMSLGDFYGSTALQQACNNAYNRGIVVIAAAGNNGSSGNRNTMDYPARYSSVIAVGAVSSNNTRASFSSVGSELEVMAPGVNILSTTPGNNYASFNGTSMAAPHVAGAAALIKAKYPSMTNVQIRNRLKNTATNLGDPFFYGKGVINVESALQ

SEQ ID NO: 248 - protein, 275 aa, artificial sequence
  LG12-clade protease variant
AQTVPWGIPHIKADKAHAAGVTGSGVKVAILDTGIDANHADLNVKGGASFVTGEPNALQDGNGHGTHVAGTVAALNNTTGVLGVAYNADLYAVKVLSASGSGTLSGIAQGIEWSISNGMNVINMSLGVMHGSTALQQACNNAYNRGIVVIAAAGNDGSSGNRNTMDYPARYSSVIAVGAVSSNNTRASFSSVGSELEVMAPGVNILSTTPGNNYASRNGTSMAAPHVAGAAALIKAKYPSMTNVQIRNRLKNTATNLGDPFFYGKGVINVEKALQ

SEQ ID NO: 249 - protein, 275 aa, artificial sequence
  LG12-clade protease variant
AQTVPWGIPHIKADKAHAAGVTGSGVKVAILDTGIDANHADLNVKGGASFVSGEPNALQDGNGHGTHVAGTVAALNNTTGVLGVAYNADLYAVKVLSASGSGTLSGIAQGIEWSISNGMNVINMSLGVMHGSTALQQACNNAYNRGIVVIAAAGNSGSSGNRNTMDYPARYSSVIAVGAVSSNNTRASFSSVGSELEVMAPGVNILSTTPGNNYASRNGTSMAAPHVAGAAALIKAKYPSMTNVQIRNRLKNTATNLGDPFFYGKGVINVEKALQ

SEQ ID NO: 250 - protein, 275 aa, artificial sequence
  LG12-clade protease variant
AQTVPWGIPHIKADKAHAAGVTGSGVKVAILDTGIDANHADLNVKGGASFVTYEPNALQDGNGHGTHVAGTVAALNNTTGVLGVAYNADLYAVKVLSASGSGTLSGIAQGIEWSISNGMNVINMSLGVMHGSTALQQACNNAYNRGIVVIAAAGNDGSSGNRNTMHYPARYSSVIAVGAVSSNNTRASFSSVGSELEVMAPGVNILSTTPGNNYASRNGTSMAAPHVAGAAALIKAKYPSMTNVQIRNRLKNTATELGDPFFYGKGVINVESALQ

SEQ ID NO: 251 - protein, 275 aa, artificial sequence
  LG12-clade protease variant
AQTVPWGIPHIKADKAHAAGVTGSGVKVAILDTGIDANHADLNVKGGASFVSGEPNALQDGNGHGTHVAGTVAALNNTTGVLGVAYNADLYAVKVLSASGSGTLSGIAQGIEWSISNGMNVINMSLGVMHGSTALQQACNNAYNRGIVVIAAAGNSGSSGNRNTMDYPARYSSVIAVGAVSSNNTRASFSSVGSELEVMAPGVNILSTTPGNNYASFNGTSMAAPHVAGAAALIKAKYPSMTNVQIRNRLKNTATNLGDPFFYGKGVINVEKALQ

SEQ ID NO: 252 - protein, 275 aa, artificial sequence
  LG12-clade protease variant
AQTVPWGIPHIKADKAHAAGVTGSGVKVAILDTGIDANHADLNVKGGASFVTGEPNALQDGNGHGTHVAGTVAALDNTTGVLGVAYNADLYAVKVLSASGSGTLSGIAQGIEWSISNGMNVINMSLGVMHGSTALQQACNNAYNRGIVVIAAAGNSGSSGNRNTMDYPARYSSVIAVGAVSSNNTRASFSSVGSELEVMAPGVNILSTTPGNNYASRNGTSMAAPHVAGAAALIKAKYPSMTNVQIRNRLKNTATELGDPFFYGKGVINVEKALQ

SEQ ID NO: 253 - protein, 275 aa, artificial sequence
  LG12-clade protease variant
AQTVPWGIPHIKADKAHAAGVTGSGVKVAILDTGIDANHADLNVKGGASFVTGEPNALQDGNGHGTHVAGTVAALDNTTGVLGVAYNADLYAVKVLSASGSGTLSGIAQGIEWSISNRMNVINMSLGVMHGSTALQQACNNAYNRGIVVIAAAGNSGSSGNRNTMDYPARYSSVIAVGAVSSNNTRASFSSVGSELEVMAPGVNILSTTPGNNYASRNGTSMAAPHVAGAAALIKAKYPSMTNVQIRERLKNTATELGDPFFYGKGVINVEKALQ

SEQ ID NO: 254 - protein, 275 aa, artificial sequence
  LG12-clade protease variant
AQTVPWGIPHIKADKAHAAGVTGSGVKVAILDTGIDANHADLNVKGGASFVSGEPNALQDGNGHGTHVAGTVAALDNTTGVLGVAYNADLYAVKVLSASGSGTLSGIAQGIEWSISNGMNVINMSLGVMHGSTALQQACNNAYNRGIVVIAAAGNDGSSGNRNTMDYPARYSSVIAVGAVSSNNTRASFSSVGSELEVMAPGVNILSTTPGNNYASRNGTSMAAPHVAGAAALIKAKYPSMTNVQIRNRLKNTATNLGDPFFYGKGVINVEKALQ

SEQ ID NO: 255 - protein, 275 aa, artificial sequence
  LG12-clade protease variant
AQTVPWGIPHIKADKAHAAGVTGSGVKVAILDTGIDANHADLNVKGGASFVTGEPNALQDGNGHGTHVAGTVAALNNTTGVLGVAYNADLYAVKVLSASGSGTLSGIAQGIEWSISNGMNVINMSLGVMHGSTALQQACNNAYNRGIVVIAAAGNSGSSGNRNTMDYPARYSSVIAVGAVSSNNTRASFSSVGSELEVMAPGVNILSTTPGNNYASRNGTSMAAPHVAGAAALIKAKYPSMTNVQIRNRLKNTATELGDPFFYGKGVINVEKALQ

SEQ ID NO: 256 - protein, 275 aa, artificial sequence
  LG12-clade protease variant
AQTVPWGIPHIKADKAHAAGVTGSGVKVAILDTGIDANHADLNVKGGASFVTGEPNALQDGNGHGTHVAGTVAALDNTTGVLGVAYNADLYAVKVLSASGSGTLSGIAQGIEWSISNRMNVINMSLGVMHGSTALQQACNNAYNRGIVVIAAAGNSGSSGNRNTMDYPARYSSVIAVGAVSSNNTRASFSSVGSELEVMAPGVNILSTTPGNNYASRNGTSMAAPHVAGAAALIKAKYPSMTNVQIRERLKNTATNLGDPFFYGKGVINVEKALQ

SEQ ID NO: 257 - protein, 275 aa, artificial sequence
  LG12-clade protease variant
AQTVPWGIPHIKADKAHAAGVTGSGVKVAILDTGIDANHADLNVKGGASFVTGEPNALQDGNGHGTHVAGTVAALNNTTGVLGVAYNADLYAVKVLSASGSGTLSGIAQGIEWSISNRMNVINMSLGVMHGSTALQQACNNAYNRGIVVIAAAGNSGSSGNRNTMDYPARYSSVIAVGAVSSNNTRASFSSVGSELEVMAPGVNILSTTPGNNYASRNGTSMAAPHVAGAAALIKAKYPSMTNVQIRERLKNTATNLGDPFFYGKGVINVEKALQ

SEQ ID NO: 258 - protein, 275 aa, artificial sequence
  LG12-clade protease variant
AQTVPWGIPHIKADKAHAAGVTGSGVKVAILDTGIDANHADLNVKGGASFVSGEPNALQDGNGHGTHVAGTVAALNNTTGVLGVAYNADLYAVKVLSASGSGTLSGIAQGIEWSISNRMNVINMSLGVMHGSTALQQACNNAYNRGIVVIAAAGNDGSSGNRNTMDYPARYSSVIAVGAVSSNNTRASFSSVGSELEVMAPGVNILSTTPGNNYASRNGTSMAAPHVAGAAALIKAKYPSMTNVQIRNRLKNTATNLGDPFFYGKGVINVESALQ

SEQ ID NO: 259 - protein, 275 aa, artificial sequence
  LG12-clade protease variant
AQTVPWGIPHIKADKAHAAGVTGSGVKVAILDTGIDANHADLNVKGGASFVTGEPNALQDGNGHGTHVAGTVAALDNTTGVLGVAYNADLYAVKVLSASGSGTLSGIAQGIEWSISNRMNVINMSLGVMHGSTALQQACNNAYNRGIVVIAAAGNSGSSGNRNTMDYPARYSSVIAVGAVSSNNTRASFSSVGSELEVMAPGVNILSTTPGNNYASRNGTSMAAPHVAGAAALIKAKYPSMTNVQIRNRLKNTATELGDPFFYGKGVINVEKALQ

SEQ ID NO: 260 - protein, 275 aa, artificial sequence
  LG12-clade protease variant
AQTVPWGIPHIKADKAHAAGVTGSGVKVAILDTGIDANHADLNVKGGASFVSGEPNALQDGNGHGTHVAGTVAALDNTTGVLGVAYNADLYAVKVLSASGSGTLSGIAQGIEWSISNRMNVINMSLGVMHGSTALQQACNNAYNRGIVVIAAAGNDGSSGNRNTMDYPARYSSVIAVGAVSSNNTRASFSSVGSELEVMAPGVNILSTTPGNNYASRNGTSMAAPHVAGAAALIKAKYPSMTNVQIRNRLKNTATNLGDPFFYGKGVINVESALQ

SEQ ID NO: 261 - protein, 275 aa, artificial sequence
  LG12-clade protease variant
AQTVPWGIPHIKADKAHAAGVTGSGVKVAILDTGIDANHADLNVKGGASFVTYEPNALQDGNGHGTHVAGTVAALNNTTGVLGVAYNADLYAVKVLSASGSGTLSGIAQGIEWSISNGMNVINMSLGVMHGSTALQQACNNAYNRGIVVIAAAGNDGSSGNRNTMHYPARYSSVIAVGAVSSNNTRASFSSVGSELEVMAPGVNILSTTPGNNYASRNGTSMAAPHVAGAAALIKAKYPSMTNVQIRERLKNTATELGDPFFYGKGVINVEKALQ

SEQ ID NO: 262 - protein, 275 aa, artificial sequence
  LG12-clade protease variant
AQTVPWGIPHIKADKAHAAGVTGSGVKVAILDTGIDANHADLNVKGGASFVSGEPNALQDGNGHGTHVAGTVAALNNTTGVLGVAYNADLYAVKVLSASGSGTLSGIAQGIEWSISNGMNVINMSLGVMHGSTALQQACNNAYNRGIVVIAAAGNSGSSGNRNTMDYPARYSSVIAVGAVSSNNTRASFSSVGSELEVMAPGVNILSTTPGNNYASRNGTSMAAPHVAGAAALIKAKYPSMTNVQIRNRLKNTATNLGDPFFYGKGVINVESALQ

SEQ ID NO: 263 - protein, 275 aa, artificial sequence
  LG12-clade protease variant
AQTVPWGIPHIKADKAHAAGVTGSGVKVAILDTGIDANHADLNVKGGASFVTYEPNALQDGNGHGTHVAGTVAALNNTTGVLGVAYNADLYAVKVLSASGSGTLSGIAQGIEWSISNGMNVINMSLGVMHGSTALQQACNNAYNRGIVVIAAAGNSGSSGNRNTMDYPARYSSVIAVGAVSSNNTRASFSSVGSELEVMAPGVNILSTTPGNNYASFNGTSMAAPHVAGAAALIKAKYPSMTNVQIRNRLKNTATNLGDPFFYGKGVINVEKALQ

SEQ ID NO: 264 - protein, 275 aa, artificial sequence
  LG12-clade protease variant
AQTVPWGIPHIKADKAHAAGVTGSGVKVAILDTGIDANHADLNVKGGASFVTYEPNALQDGNGHGTHVAGTVAALDNTTGVLGVAYNADLYAVKVLSASGSGTLSGIAQGIEWSISNRMNVINMSLGVMHGSTALQQACNNAYNRGIVVIAAAGNSGSSGNRNTMDYPARYSSVIAVGAVSSNNTRASFSSVGSELEVMAPGVNILSTTPGNNYASRNGTSMAAPHVAGAAALIKAKYPSMTNVQIRNRLKNTATNLGDPFFYGKGVINVESALQ

SEQ ID NO: 265 - protein, 275 aa, artificial sequence
  LG12-clade protease variant
AQTVPWGIPHIKADKAHAAGVTGSGVKVAILDTGIDANHADLNVKGGASFVSYEPNALQDGNGHGTHVAGTVAALNNTTGVLGVAYNADLYAVKVLSASGSGTLSGIAQGIEWSISNRMNVINMSLGVMHGSTALQQACNNAYNRGIVVIAAAGNSGSSGNRNTMDYPARYSSVIAVGAVSSNNTRASFSSVGSELEVMAPGVNILSTTPGNNYASFNGTSMAAPHVAGAAALIKAKYPSMTNVQIRNRLKNTATELGDPFFYGKGVINVEKALQ

SEQ ID NO: 266 - protein, 275 aa, artificial sequence
  LG12-clade protease variant
AQTVPWGIPHIKADKAHAAGVTGSGVKVAILDTGIDANHADLNVKGGASFVSGEPNALQDGNGHGTHVAGTVAALNNTTGVLGVAYNADLYAVKVLSASGSGTLSGIAQGIEWSISNGMNVINMSLGVMHGSTALQQACNNAYNRGIVVIAAAGNSGSSGNRNTMDYPARYSSVIAVGAVSSNNTRASFSSVGSELEVMAPGVNILSTTPGNNYASRNGTSMAAPHVAGAAALIKAKYPSMTNVQIRDRLKNTATNLGDPFFYGKGVINVEKALQ

SEQ ID NO: 267 - protein, 275 aa, artificial sequence
  LG12-clade protease variant
AQTVPWGIPHIKADKAHAAGVTGSGVKVAILDTGIDANHADLNVKGGASFVSGEPNALQDGNGHGTHVAGTVAALNNTTGVLGVAYNADLYAVKVLSASGSGTLSGIAQGIEWSISNGMNVINMSLGVMHGSTALQQACNNAYNRGIVVIAAAGNSGSSGNRNTMDYPARYSSVIAVGAVSSNNTRASFSSVGSELEVMAPGVNILSTTPGNNYASFNGTSMAAPHVAGAAALIKAKYPSMTNVQIRNRLKNTATNLGDPFFYGKGVINVESALQ

SEQ ID NO: 268 - protein, 275 aa, artificial sequence
  LG12-clade protease variant
AQTVPWGIPHIKADKAHAAGVTGSGVKVAILDTGIDANHADLNVKGGASFVSGEPNALQDGNGHGTHVAGTVAALDNTTGVLGVAYNADLYAVKVLSASGSGTLSGIAQGIEWSISNRMNVINMSLGVMHGSTALQQACNNAYNRGIVVIAAAGNSGSSGNRNTMDYPARYSSVIAVGAVSSNNTRASFSSVGSELEVMAPGVNILSTTPGNNYASFNGTSMAAPHVAGAAALIKAKYPSMTNVQIRNRLKNTATELGDPFFYGKGVINVEKALQ

SEQ ID NO: 269 - protein, 275 aa, artificial sequence
  LG12-clade protease variant
AQTVPWGIPHIKADKAHAAGVTGSGVKVAILDTGIDANHADLNVKGGASFVTYEPNALQDGNGHGTHVAGTVAALDNTTGVLGVAYNADLYAVKVLSASGSGTLSGIAQGIEWSISNRMNVINMSLGVMHGSTALQQACNNAYNRGIVVIAAAGNDGSSGNRNTMDYPARYSSVIAVGAVSSNNTRASFSSVGSELEVMAPGVNILSTTPGNNYASRNGTSMAAPHVAGAAALIKAKYPSMTNVQIRNRLKNTATNLGDPFFYGKGVINVEKALQ

SEQ ID NO: 270 - protein, 275 aa, artificial sequence
  LG12-clade protease variant
AQTVPWGIPHIKADKAHAAGVTGSGVKVAILDTGIDANHADLNVKGGASFVSGEPNALQDGNGHGTHVAGTVAALDNTTGVLGVAYNADLYAVKVLSASGSGTLSGIAQGIEWSISNRMNVINMSLGVMHGSTALQQACNNAYNRGIVVIAAAGNSGSSGNRNTMDYPARYSSVIAVGAVSSNNTRASFSSVGSELEVMAPGVNILSTTPGNNYASRNGTSMAAPHVAGAAALIKAKYPSMTNVQIRERLKNTATNLGDPFFYGKGVINVESALQ

SEQ ID NO: 271 - protein, 275 aa, artificial sequence
  LG12-clade protease variant
AQTVPWGIPHIKADKAHAAGVTGSGVKVAILDTGIDANHADLNVKGGASFVTGEPNALQDGNGHGTHVAGTVAALDNTTGVLGVAYNADLYAVKVLSASGSGTLSGIAQGIEWSISNRMNVINMSLGVMHGSTALQQACNNAYNRGIVVIAAAGNDGSSGNRNTMDYPARYSSVIAVGAVSSNNTRASFSSVGSELEVMAPGVNILSTTPGNNYASRNGTSMAAPHVAGAAALIKAKYPSMTNVQIRNRLKNTATELGDPFFYGKGVINVEKALQ

SEQ ID NO: 272 - protein, 275 aa, artificial sequence
  LG12-clade protease variant
AQTVPWGIPHIKADKAHAAGVTGSGVKVAILDTGIDANHADLNVKGGASFVSGEPNALQDGNGHGTHVAGTVAALNNTTGVLGVAYNADLYAVKVLSASGSGTLSGIAQGIEWSISNGMNVINMSLGVMHGSTALQQACNNAYNRGIVVIAAAGNSGSSGNRNTMGYPARYSSVIAVGAVSSNNTRASFSSVGSELEVMAPGVNILSTTPGNNYASRNGTSMAAPHVAGAAALIKAKYPSMTNVQIRNRLKNTATNLGDPFFYGKGVINVESALQ

We claim:

1. A protease variant, or a recombinant polypeptide or an active fragment thereof comprising an amino acid sequence comprising two or more substitutions at one or more positions selected from:
(i) 1, 3, 7, 9, 19, 24, 27, 30, 38, 40, 43, 45, 48, 52, 53, 57, 72, 76, 78, 79, 86, 87, 88, 89, 90, 91, 93, 97, 99, 100, 101, 103, 104, 106, 107, 111, 114, 115, 116, 117, 118, 120, 122, 123, 124, 128, 129, 130, 131, 133, 134, 136, 139, 140, 141, 143, 144, 145, 147, 148, 149, 150, 153, 156, 158, 159, 160, 166, 181, 182, 185, 188, 194, 209, 212, 213, 215, 216, 217, 222, 224, 228, 234, 236, 238, 240, 242, 245, 246, 248, 251, 252, 256, 265, 267, 269, 270, 271, 272, 273, and 275;
(ii) 1, 3, 9, 19, 24, 27, 30, 38, 40, 43, 45, 48, 52, 53, 57, 72, 76, 78, 79, 86, 87, 88, 89, 90, 91, 93, 97, 99, 100, 101, 103, 104, 106, 107, 111, 114, 115, 116, 117, 118, 120, 122, 123, 124, 128, 129, 130, 131, 133, 134, 136, 139, 140, 141, 143, 144, 145, 147, 148, 149, 150, 153, 156, 158, 159, 160, 166, 181, 182, 185, 188, 194, 209, 212, 213, 215, 216, 217, 222, 224, 228, 234, 236, 238, 240, 242, 245, 246, 248, 251, 252, 256, 265, 267, 271, 272, and 275;
(iii) 1, 7, 9, 27, 38, 40, 45, 48, 52, 53.76, 78, 91, 100, 114, 117, 118, 122, 128, 129, 130, 140, 147, 149, 156, 158, 159, 160, 166, 181, 182, 194, 209, 217, 222, 228, 234, 236, 238, 245, 248, 256, 269, 270, 271, 272, 273, and 275;
(iv) 1, 24, 30, 38, 40, 48, 52, 53, 76, 78, 79, 86, 87, 88, 89, 91, 93, 97, 100, 103, 104, 106, 111, 114, 115, 116, 117, 118, 120, 122, 124, 128, 129, 130, 131, 133, 134, 136, 139, 141, 143, 144, 147, 148, 149, 150, 153, 156, 158, 159, 166, 182, 185, 194, 209, 212, 213, 216, 217, 222, 224, 236, 238, 248, 251, 252, 256, 272, and 275;
(v) 1, 24, 30, 38, 40, 52, 53, 76, 78, 79, 86, 87, 88, 89, 93, 97, 100, 103, 104, 106, 111, 114, 115, 116, 117, 118, 120, 122, 124, 128, 129, 131, 133, 134, 136, 139, 141, 143, 144, 147, 148, 149, 150, 153, 156, 158, 159, 166, 182, 185, 194, 209, 212, 213, 216, 217, 222, 224, 236, 238, 248, 251, 252, 256, 272, and 275; or
(vi) 1.38, 40, 48, 52, 53, 76, 91, 114, 117, 118, 128, 129, 130, 147, 149, 156, 158, 159, 166, 182, 217, 238, 248, 256, and 272;
wherein the amino acid positions of the variant or recombinant polypeptide or active fragment thereof are numbered by correspondence with the amino acid sequence of SEQ ID NO: 10.

2. The protease variant, or recombinant polypeptide or active fragment thereof of any preceding claim, wherein said variant or recombinant polypeptide or active fragment thereof comprises an amino acid sequence comprising two or more substitutions selected from:
(i) A1X, T3X, G7X, P9X, A19X, S24X, K27X, I30X, N38X, A40X, N43X, K45X, A48X, S52X, G53X, A57X, V72X, N76X, T78X, T79X, Y86X, N87X, A88X, D89X, L90X, Y91X, V93X, S97X, S99X, G100X, S101X, T103X, L104X, G106X, I107X, I11X, S114X, I115X, S116X, N117X, G118X, N120X, I122X, N123X, M124X, G128X, S129X, S130X, G131X, T133X, A134X, Q136X, C139X, N140X, N141X, Y143X, N144X, R145X, I147X, V148X, V149X, I150X, A153X, S156X, S158X, S159X, G160X, G166X, S181X, S182X, T185X, S188X, S194X, T209X, N212X, N213X, A215X, S216X, F217X, M222X, A224X, A228X, I234X, A236X, Y238X, S240X, T242X, Q245X, I246X, E248X, K251X, N252X, N256X, K265X, V267X, N269X, V270X, E271X, S272X, A273X, and Q275X;
(ii) A1X, T3X, P9X, A19X, S24X, K27X, 130X, N38X, A40X, N43X, K45X, A48X, S52X, G53X, A57X, V72X, N76X, T78X, T79X, Y86X, N87X, A88X, D89X, L90X, Y91X, V93X, S97X, S99X, G100X, S101X, T103X, L104X, G106X, I107X, I111X, S114X, I115X, S116X, N117X, G118X, N120X, I122X, N123X, M124X, G128X, S129X, S130X, G131X, T133X, A134X, Q136X, C139X, N140X, N141X, Y143X, N144X, R145X, I147X, V148X, V149X, I150X, A153X, S156X, S158X, S159X, G160X, G166X, S181X, S182X, T185X, S188X, S194X, T209X, N212X, N213X, A215X, S216X, F217X, M222X, A224X, A228X, I234X, A236X, Y238X, S240X, T242X, Q245X, I246X, E248X, K251X, N252X, N256X, K265X, V267X, E271X, S272X, and Q275X;
(iii) A1X, G7X, P9X, K27X, N38X, A40X, K45X, A48X, S52X, G53X, N76X, T78X, Y91X, G100X, S114X, N117X, G118X, I122X, G128X, S129X, S130X, N140X, I147X, V149X, S156X, S158X, S159X, G160X, G166X, S181X, S182X, S194X, T209X, F217X, M222X, A228X, I234X, A236X, Y238X, Q245X, E248X, N256X, N269X, V270X, E271X, S272X, A273X, and Q275X;
(iv) A1X, S24X, I30X, N38X, A40X, A48X, S52X, G53X, N76X, T78X, T79X, Y86X, N87X, A88X, D89X, Y91X, V93X, S97X, G100X, T103X, L104X, G106X, I111X, S114X, I115X, S116X, N117X, G118X, N120X, I122X, M124X, G128X, S129X, S130X, G131X, T133X, A134X, Q136X, C139X, N141X, Y143X, N144X, I147X, V148X, V149X, I150X, A153X, S156X, S158X, S159X, G166X, S182X, T185X, S194X, T209X, N212X, N213X, S216X, F217X, M222X, A224X, A236X, Y238X, E248X, K251X, N252X, N256X, S272X, and Q275X;
(v) A1X, S24X, I30X, N38X, A40X, S52X, G53X, N76X, T78X, T79X, Y86X, N87X, A88X, D89X, V93X, S97X, G100X, T103X, L104X, G106X, I111X, S114X, I115X, S116X, N117X, G118X, N120X, I122X, M124X, G128X, S129X, G131X, T133X, A134X, Q136X, C139X, N141X, Y143X, N144X, I147X, V148X, V149X, I150X, A153X, S156X, S158X, S159X, G166X, S182X, T185X, S194X, T209X, N212X, N213X, S216X, F217X, M222X, A224X, A236X, Y238X, E248X, K251X, N252X, N256X, S272X, and Q275X; or
(vi) A1X, N38X, A40X, A48X, S52X, G53X, N76X, Y91X, S114X, N117X, G118X, G128X, S129X, S130X, I147X, V149X, S156X, S158X, S159X, G166X, S182X, F217X, Y238X, E248X, N256X, and S272X;
wherein X is any amino acid and the amino acid positions of the variant or recombinant polypeptide or active fragment thereof are numbered by correspondence with the amino acid sequence of SEQ ID NO:10.

3. The protease variant, or recombinant polypeptide or active fragment thereof of any preceding claim, wherein said variant or recombinant polypeptide or active fragment thereof comprises an amino acid sequence comprising two or more substitutions selected from:
(i) X1G, X1T, X3E, X3V, X7C, X9I, X9T, X9V, X19R, X24R, X24T, X27S, X27T, X30V, X38A, X38Q, X38T, X40D, X40E, X40L, X40V, X43D, X43H, X43L, X43S, X45Q, X45R, X48E, X48Q, X52A, X52N, X52Q, X52T, X53D, X53E, X53N, X57P, X72A, X76D, X78A, X78D, X78G, X78S, X79I, X86P, X87S, X88V, X89E, X89S, X90P, X91H, X93T, X97G, X99L, X100A, X100K, X101T, X103E, X103S, X104V, X106S, X107T, X107V, X111L, X114A, X114T, X115G, X116E, X116N, X117E, X117S, X118R, X120H, X122A, X123D, X124L, X128A, X128D, X128E, X128H, X128K, X128M, X128N, X128Q, X128S, X128Y, X129D, X129E, X129G, X129H, X129I, X129K, X129L, X129M, X129N, X129P, X129Q, X129R, X129T, X129V, X129Y, X130A, X130E, X130F, X130G, X130H, X130I, X130L, X130M, X130N, X130Q, X130R, X130T, X130V, X130W, X130Y, X131P, X133A, X133D, X133V, X134T, X136E, X139V, X140D, X140Y, X141S, X143T, X144S, X145N, X145W, X147A, X147V, X148L, X149G, X149L, X149N, X149S, X150V, X153S, X156A, X156H, X156N, X158T, X158V, X159D, X159E, X159N, X159Q, X160D, X166A, X166D, X166H, X166N, X166S, X166Y, X181A, X181N, X182E, X185Q, X188Y, X194P, X209F, X209V, X209Y, X212S, X213T, X215D, X215E, X216T, X217L, X217R, X222L, X224T, X228S, X234V, X236N, X236Q, X238F, X240F, X242S, X245A, X245N, X246V, X248K, X248N, X251R, X251S, X252S, X256E, X256K, X256P, X256R, X256Y, X265S, X267N, X269K, X270C, X271F, X271W, X272K, X272N, X272Q, X273V, X275H, and X275R;
(ii) X1G, X1T, X3E, X3V, X9I, X9T, X9V, X19R, X24R, X24T, X27S, X27T, X30V, X38A, X38Q, X38T, X40D, X40E, X40L, X40V, X43D, X43H, X43L, X43S, X45Q, X45R, X48E, X48Q, X52A, X52N, X52Q, X52T, X53D, X53E, X53N, X57P, X72A, X76D, X78A, X78D, X78G, X78S, X791, X86P, X87S, X88V, X89E, X89S, X90P, X91H, X93T, X97G, X99L, X100A, X100K, X101T, X103E, X103S, X104V, X106S, X107T, X107V, X111L, X114A, X114T, X115G, X116E, X116N, X117E, X117S, X118R, X120H, X122A, X123D, X124L, X128A, X128D, X128E, X128H, X128K, X128M, X128N, X128Q, X128S, X128Y, X129D, X129E, X129G, X129H, X129I, X129K, X129L, X129M, X129N, X129P, X129Q, X129R, X129T, X129V, X129Y, X130A, X130E, X130F, X130G, X130H, X130O, X130L, X130M, X130N, X130Q, X130R, X130T, X130V, X130W, X130Y, X131P, X133A, X133D, X133V, X134T, X136E, X139V, X140D, X140Y, X141S, X143T, X144S, X145N, X145W, X147A, X147V, X148L, X149G, X149L, X149N, X149S, X150V, X153S, X156A, X156H, X156N, X158T, X158V, X159D, X159E, X159N, X159Q, X160D, X166A, X166D, X166H, X166N, X166S, X166Y, X181A, X181N, X182E, X185Q, X188Y, X194P, X209F, X209V, X209Y, X212S, X213T, X215D, X215E, X216T, X217L, X217R, X222L, X224T, X228S, X234V, X236N, X236Q, X238F, X240F, X242S, X245A, X245N, X246V, X248K, X248N, X251R, X251S, X252S, X256E, X256K, X256P, X256R, X256Y, X265S, X267N, X271F, X271W, X272K, X272N, X272Q, X275H, and X275R;
(iii) X1G, X7C, X9T, X27M, X38Q, X38T, X40D, X45Q, X45R, X48E, X48Q, X52F, X52Q, X52T, X53D, X53E, X53Y, X76D, X78A, X91H, X100A, X114T, X117S, X118R, X122V, X128A, X128D, X128E, X128H, X128K, X128L, X128M, X128N, X128Q, X128R, X128S, X128T, X128V, X128W, X128Y, X129D, X129E, X129F, X129G, X129H, X129I, X129K, X129L, X129M, X129N, X129P, X129Q, X129R, X129T, X129V, X129Y, X130A, X130D, X130E, X130F, X130G, X130H, X130I, X130L, X130M, X130N, X130Q, X130R, X130T, X130V, X130W, X130Y, X140D, X147A, X149G, X156D, X156H, X156N, X156T, X158T, X158V, X159D, X159N, X160D, X166D, X166H, X166Y, X181N, X182E, X194P, X209V, X217R, X222L, X228S, X234V, X236N, X236Q, X238F, X245A, X248D, X248K, X248N, X256E, X256P, X256R, X269K, X270C, X271G, X272K, X272Q, X273V, X275R, and X275Y;
(iv) X1G, X1T, X24R, X24T, X30V, X38A, X38Q, X38T, X40D, X40E, X40L, X40V, X48Q, X52A, X52N, X52Q, X52T, X53D, X53E, X53N, X76D, X78A, X78D, X78G, X78S, X79I, X86P, X87S, X88V, X89E, X91H, X93T, X97G, X100A, X100K, X103E, X103S, X104V, X106S, X111L, X114A, X114T, X115G, X116E, X116N, X117E, X117S, X118R, X120H, X122A, X124L, X128A, X128D, X128E, X128H, X128K, X128M, X128N, X128Q, X128S, X128Y, X129D, X129E, X129G, X129H, X129I, X129K, X129L, X129M, X129N, X129P, X129Q, X129R, X129T, X129V, X129Y, X130F, X130H, X130I, X130Y, X131P, X133A, X133D, X133V, X134T, X136E, X139V, X141S, X143T, X144S, X147A, X147V, X148L, X149G, X149L, X149N, X149S, X150V, X153S, X156A, X156H, X156N, X158T, X158V, X159D, X159E, X159N, X159Q, X166A, X166D, X166H, X166N, X166S, X166Y, X182E, X185Q, X194P, X209F, X209V, X209Y, X212S, X213T, X216T, X217L, X217R, X222L, X224T, X236N, X236Q, X238F, X248K, X248N, X251R, X251S, X252S, X256E, X256K, X256P, X256R, X256Y, X272K, X272N, X272Q, X275H, and X275R;
(v) X1G, X1T, X24R, X24T, X30V, X38A, X38Q, X38T, X40D, X40E, X40L, X40V, X52A, X52N, X52Q, X52T, X53D, X53E, X53N, X76D, X78A, X78D, X78G, X78S, X791, X86P, X87S, X88V, X89E, X93T, X97G, X100A, X100K, X103E, X103S, X104V, X106S, X111L, X114A, X114T, X115G, X16E, X16N, X117E, X117S, X18R, X12H, X122A, X124L, X128A, X128D, X128E, X128H, X128K, X128M, X128N, X128Q, X128S, X128Y, X129D, X129E, X129G, X129H, X129I, X129K, X129L, X129M, X129N, X129P, X129Q, X129R, X129T, X129V, X129Y, X131P, X133A, X133D, X133V, X134T, X136E, X139V, X141S, X143T, X144S, X147A, X147V, X148L, X149G, X149L, X149N, X149S, X150V, X153S, X156A, X156H, X156N, X158T, X158V, X591D, X159E, X159N, X159Q, X166A, X166D, X160H, X166N, X116S, X160Y, X182E, X185Q, X194P, X209F, X209V, X209Y, X212S, X213T, X216T, X217L, X217R, X222L, X224T, X236N, X236Q, X238F, X248K, X248N, X251R, X251S, X252S, X256E, X256K, X256P, X256R, X256Y, X272K, X272N, X272Q, X275H, and X275R; or
(vi) X1G, X38Q, X40D, X48Q, X52F, X52T, X53E, X53Y, X76D, X91H, X114T, X117S, X118R, X128D, X128M, X128V, X129F, X129M, X129R, X129V, X130F, X130H, X130I, X130Y, X147A, X149G, X156N, X158T, X159N, X166D, X166H, X182E, X217R, X238F, X248N, X256E, X256P, X256R, and X272K;
wherein X is any amino acid and the amino acid positions of the variant or recombinant polypeptide or active fragment thereof are numbered by correspondence with the amino acid sequence of SEQ ID NO:10.

4. The protease variant, or recombinant polypeptide or active fragment thereof of any preceding claim, wherein said variant or recombinant polypeptide or active fragment thereof comprises an amino acid sequence comprising two or more substitutions selected from:
(i) A001G, A001T, T003E, T003V, G007C, P009I, P009T, P009V, A019R, S024R, S024T, K027S, K027T, I030V, N038A, N038Q, N038T, A040D, A040E, A040L, A040V, N043D, N043H, N043L, N043S, K045Q, K045R, A048E, A048Q, S052A, S052N, S052Q, S052T, G531D, G053E, G053N, A057P, V072A, N076D, T078A, T078D, T078G, T078S, T079I, Y086P, N087S, A088V, D089E, D089S, L090P, Y091H, V093T, S097G, S099L, G100A, G100K, S101T, T103E, T103S, L104V, G106S, I107T, I107V, I111L, S114A, S114T, I115G, S116E, S116N, N117E, N117S, G118R, N120H, I122A, N123D, M124L, G128A, G128D, G128E, G128H, G128K, G128M, G128N, G128Q, G128S, G128Y, S129D, S129E, S129G, S129H, S129I, S129K, S129L, S129M, S129N, S129P, S129Q, S129R, S129T, S129V, S129Y, S130A, S130E, S130F, S130G, S130H, S130I, S130L, S130M, S130N, S130Q, S130R, S130T, S130V, S130W, S130Y, G131P, T133A, T133D, T133V, A134T, Q136E, C139V, N140D, N140Y, N141S, Y143T, N144S, R145N, R145W, I147A, I147V, V148L, V149G, V149L, V149N, V149S, I150V, A153S, S156A, S156H, S156N, S158T, S158V, S159D, S159E, S159N, S159Q, G160D, G166A, G166D, G166H, G166N, G166S, G166Y, S181A, S181N, S182E, T185Q, S188Y, S194P, T209F, T209V, T209Y, N212S, N213T, A215D, A215E, S216T, F217L, F217R, M222L, A224T, A228S, I234V, A236N, A236Q, Y238F, S240F, T242S, Q245A, Q245N, I246V, E248K, E248N, K251R, K251S, N252S, N256E, N256K, N256P, N256R, N256Y, K265S, V267N, N269K, V270C, E271F, E271W, S272K, S272N, S272Q, A273V, Q275H, and Q275R;
(ii) A001G, A001T, T003E, T003V, P009I, P009T, P009V, A019R, S024R, S024T, K027S, K027T, I030V, N038A, N038Q, N038T, A040D, A040E, A040L, A040V, N043D, N043H, N043L, N043S, K045Q, K045R, A048E, A048Q, S052A, S052N, S052Q, S052T, G053D, G053E, G053N, A057P, V072A, N076D, T078A, T078D, T078G, T078S, T079I, Y086P, N087S, A088V, D089E, D089S, L090P, Y091H, V093T, S097G, S099L, G100A, G100K, S101T, T103E, T103S, L104V, G106S, I107T, I107V, I111L, S114A, S114T, I115G, S116E, S116N, N117E, N117S, G118R, N120H, I122A, N123D, M124L, G128A, G128D, G128E, G128H, G128K, G128M, G128N, G128Q, G128S, G128Y, S291D, S129E, S129G, S129H, S129I, S129K, S129L, S129M, S129N, S129P, S129Q, S129R, S129T, S129V, S129Y, S130A, S130E, S130F, S130G, S130H, S130I, S130L, S130M, S130N, S130Q, S130R, S130T, S130V, S130W, S130Y, G131P, T133A, T133D, T133V, A134T, Q136E, C139V, N140D, N140Y, N141S, Y143T, N144S, R145N, R145W, I147A, I147V, V148L, V149G, V149L, V149N, V149S, I150V, A153S, S156A, S156H, S156N, S158T, S158V, S159D, S159E, S159N, S159Q, G160D, G166A, G166D, G166H, G166N, G166S, G166Y, S181A, S181N, S182E, T185Q, S188Y, S194P, T209F, T209V, T209Y, N212S, N213T, A215D, A215E, S216T, F217L, F217R, M222L, A224T, A228S, I234V, A236N, A236Q, Y238F, S240F, T242S, Q245A, Q245N, I246V, E248K, E248N, K251R, K251S, N252S, N256E, N256K, N256P, N256R, N256Y, K265S, V267N, E271F, E271W, S272K, S272N, S272Q, Q275H, and Q275R;
(iii) A001G, G007C, P009T, K027M, N038Q, N038T, A040D, K045Q, K045R, A048E, A048Q, S052F, S052Q, S052T, G053D, G053E, G053Y, N076D, T078A, Y091H, G100A, S114T, N117S, G118R, I122V, G128A, G128D, G128E, G128H, G128K, G128L, G128M, G128N, G128Q, G128R, G128S, G128T, G128V, G128W, G128Y, S129D, S129E, S129F, S129G, S129H, S129I, S129K, S129L, S129M, S129N, S129P, S129Q, S129R, S129T, S129V, S129Y, S130A, S130D, S130E, S130F, S130G, S130H, S130I, S130L, S130M, S130N, S130Q, S130R, S130T, S130V, S130W, S130Y, N140D, I147A, V149G, S156D, S156H, S156N, S156T, S158T, S158V, S159D, S159N, G160D, G166D, G166H, G166Y, S181N, S182E, S194P, T209V, F217R, M222L, Y238F, Q245A, E248D, E248K, E248N, N256E, N256P, N256R, N269K, V270C, E271G, S272K, S272Q, A273V, Q275R, and Q275Y;
(iv) A001G, A001T, S024T, I030V, N038Q, A040D, A048Q, S052A, S052Q, S052T, G053D, G053E, N076D, T078D, T078S, T079I, Y086P, N087S, A088V, D089E, D089S, Y091H, V093T, S097G, G100A, T103E, T103S, L104V, G106S, I111L, S114A, S114T, I115G, S116N, N117S, G118R, N120H, I122A, M124L, G128S, S129P, S130F, S130H, S130I, S130Y, G131P, T133A, T133V, A134T, Q136E, C139V, N141S, Y143T, N144S, I147A, I147V, V148L, V149G, V149L, I150V, A153S, S156H, S156N, S158T, S159D, S159N, G166D, G166H, G166S, S182E, T185Q, S194P, T209Y, N212S, N213T, S216T, F217L, F217R, M222L, A224T, A236N, Y238F, E248N, K251S, N252S, N256P, N256R, N256Y, S272K, S272Q, and Q275H;
(v) A001G, A001T, S024T, I030V, N038Q, A040D, S052A, S052Q, S052T, G053D, G053E, N076D, T078D, T078S, T079I, Y086P, N087S, A088V, D089E, D089S, V093T, S097G, G100A, T103E, T103S, L104V, G16S, I111L, S114A, S114T, I115G, S116N, N117S, G118R, N120H, I122A, M124L, G128S, S129P, G131P, T133A, T133V, A134T, Q136E, C139V, N141S, Y143T, N144S, I147A, I147V, V148L, V149G, V149L, I150V, A153S, S156H, S156N, S158T, S159D, S159N, G166D, G166H, G166S, S182E, T185Q, S194P, T209Y, N212S, N213T, S216T, F217L, F217R, M222L, A224T, A236N, Y238F, E248N, K251S, N252S, N256P, N256R, N256Y, S272K, S272Q, and Q275H; or
(vi) A001G, N038Q, A040D, A048Q, S052F, S052T, G053E, G053Y, N076D, Y091H, S114T, N117S, G118R, G128D, G128M, G128V, S129F, S129M, S129R, S129V, S130F, S130H, S130I, S130Y, I147A, V149G, S156N, S158T, S159N, G166D, G166H, S182E, F217R, Y238F, E248N, N256E, N256P, N256R, and S272K;
wherein the amino acid positions of the variant or recombinant polypeptide or active fragment thereof are numbered by correspondence with the amino acid sequence of SEQ ID NO: 10.

5. The protease variant, or recombinant polypeptide or active fragment thereof of any preceding claim, wherein said variant or recombinant polypeptide or active fragment thereof comprises an amino acid sequence comprising two or more substitutions at one or more position selected from:
(i) 52, 53, 76, 86, 97, 103, 104, 106, 111, 114, 115, 116, 118, 120, 122, 124, 128, 129, 130, 131, 134, 136, 139, 141, 143, 144, 147, 148, 150, 156, 158, 159, 166, 217, 248, and 272;
(ii) 53, 76, 106, 128, 131, 134, 139, 158, 159, 166, 217, 248, and 272;
(iii) 52, 53, 76, 106, 118, 128, 129, 130, 131, 134, 139, 156, 158, 166, 217, 248, and 272;
(iv) 52, 53, 76, 128, 118, 156, 158, 166, 217, and 248;
(v) 53, 76, 128, 158, 166, and 248;
(vi) 52, 53, 76, 118, 128, 156, 158, 166, 217, and 248; or
(vii) 52-129, 53-166, 76-166, 166-159, 166-27, 53-76-166, 53-118-166, 53-166-272, 76-118-166, 76-166-248, 76-166-256, and 76-166-272;
wherein the amino acid positions of the variant or recombinant polypeptide or active fragment thereof are numbered by correspondence with the amino acid sequence of SEQ ID NO:10.

6. The protease variant, or recombinant polypeptide or active fragment thereof of any preceding claim, wherein said variant or recombinant polypeptide or active fragment thereof comprises an amino acid sequence comprising two or more substitutions selected from:
(i) S52X, G53X, N76X, Y86X, S97X, T103X, L104X, G106X, I111X, S114X, I115X, S116X, G118X, N120X, I122X, M124X, G128X, S129X, S130X, G131X, A134X, Q136X, C139X, N141X, Y143X, N144X, I147X, V148X, I150X, S156X, S158X, S159X, G166X, F217X, E248X, and S272X;
(ii) G53X, N76X, G106X, G128X, G131X, A134X, C139X, S158X, S159X, G166X, F217X, E248X, and S272X;
(iii) S52X, G53X, N76X, G106X, G118X, G128X, S129X, S130X, G131X, A134X, C139X, S156X, G166X, F217X, E248X, and S272X,
(iv) S52X, G53X, N76X, G118X, G128X, S156X, S158X, G166X, F217X, and E248X;
(v) G53X, N76X, G128X, S158X, G166X, and E248X;
(vi) S52X, G53X, N76X, G118X, G128X, S156X, S158X, G166X, F217X, and E248X; or
(vii) S52X-S129X, G53X-G166X, N76X-G166X, G166X-S159X, G166X-S272X, G53X-N76X-G166X, G3X-G118X-G166X, G53X-G166X-S272X, N76X-G118X-G166X, N76X-G166X-E248X, N76X-G166X-N256X, and N76X-G166X-S272X;
wherein X is any amino acid and the amino acid positions of the variant or recombinant polypeptide or active fragment thereof are numbered by correspondence with the amino acid sequence of SEQ ID NO:10.

7. The protease variant, or recombinant polypeptide or active fragment thereof of any preceding claim, wherein said variant or recombinant polypeptide or active fragment thereof comprises an amino acid sequence comprising two or more substitutions selected from:
(i) X52T, X53D, X76D, X86P, X97G, X103S, X104V, X006S, X111L, X114A, X115G, X116N, X118R, X120H, X122A, X124L, X128D, X128S, X129F, X130Y, X131P, X134T, X136E, X139V, X141S, X143T, X144S, X147V, X148L, X150V, X156N, X158T, X159D, X166D, X217R, X248N, and X272K;
(ii) X53D, X76D, X106S, X128S, X131P, X134T, X139V, X158T, X159D, X166D, X217R, X248N, and X272K;
(iii) X52T, X53D, X76D, X106S, X118R, X128D, X129F, X130Y, X131P, X134T, X139V, X156N, X166D, X217R, X248N, and X272K;
(iv) X52T, X53D, X76D, X118R, X128S, X156N, X158T, X166D, X217R, and X248N;
(v) X53D, X76D, X128S, X158T, X166D, and X248N;
(vi) X52T, X53D, X76D, X118R, X128S, X156N, X158T, X166D, X217R, and X248N; or
(vii) X52T-X129F, X53D-X166D, X76D-X166D, X166H-X159D, X166D-X272K, X53D-X76D-X166D, X53D-X118R-X166D, X53D-X166D-X272K, X76D-X118R-X166D, X76D-X166D-X248K, X76D-X166D-X256R, and X76D-X166D-X272K;
wherein X is any amino acid and the amino acid positions of the variant or recombinant polypeptide or active fragment thereof are numbered by correspondence with the amino acid sequence of SEQ ID NO:10.

8. The protease variant, or recombinant polypeptide or active fragment thereof of any preceding claim, wherein said variant or recombinant polypeptide or active fragment thereof comprises an amino acid sequence comprising two or more substitutions selected from:
(i) S52T, G53D, N76D, Y086P, S097G, T103S, L104V, G106S, I111L, S114A, I115G, S116N, G118R, N120H, I122A, M124L, G128D, G128S, S129F, S129P, S130Y, G131P, A134T, Q136E, C139V, N141S, Y143T, N144S, I147V, V148L, I150V, S156N, S158T, S159D, G166D, F217R, E248N, and S272K;
(ii) G53D, N76D, G106S, G128S, G131P, A134T, C139V, S158T, S159D, G166D, F217R, E248N, and S272K;
(iii) S52T, G53D, N76D, G106S, G118R, G128D, S129F, S130Y, G131P, A134T, C139V, S156N, G166D, F217R, E248N, and S272K;
(iv) S52T, G53D, N76D, G118R, G128S, S156N, S158T, G166D, F217R, and E248N;
(v) G53D, N76D, G128S, S158T, G166D, and E248N;
(vi) S52T, G53D, N76D, G118R, S156N, S158T, G166D, F217R, and E248N; or
(vii) S52T-S129F, G53D-G166D, N76D-G166D, G166H-S159D, G166D-S272K, G53D-N76D-G166D, G53D-G118R-G166D, G53D-G166D-S272K, N76D-G118R-G166D, N76D-G166D-E248K, N76D-G166D-N256R, and N76D-G166D-S272K;
wherein the amino acid positions of the variant or recombinant polypeptide or active fragment thereof are numbered by correspondence with the amino acid sequence of SEQ ID NO: 10.

9. The protease variant, or recombinant polypeptide or active fragment thereof of any preceding claim, wherein said two or more substitutions is selected from S052T-S129F; G053D-G166D; N076D-G166D; G166H-S159D; G166D-S272K; G053D-N076D-G166D; G053D-G118R-G166D; G053D-G166D-S272K; N076D-G118R-G166D; N076D-G166D-E248K; N076D-G166D-N256R; N076D-G166D-S272K; S024T-G053E-G166D-M222L-N256P; V149L-S156H-T185Q-S272Q-S159D; G053D-N076D-G118R-G166D-N256R; S052T-V149G-S156N-G166H-F217R; S052T-V149G-S156N-G166D-F217R; S052T-V149G-S156N-S159D-G166D-F217R; S052T-V149G-S156N-G166D-S182E-F217R; A040D-S114T-I147A-S159N-G166D-S182E; N038Q-G053E-G100A-N117S-I147A-S158T-G166D-S272K; N038Q-G053E-N117S-I147A-S158T-G166D-N256P-S272K; A001G-S052Q-V149G-S156N-S159N-S182E-Y238F-S272Q; A001G-S052Q-S114T-S156N-S159N-S182E-Y238F-S272Q; N038Q-G053E-G100A-N117S-I147A-S158T-G166D-N256P-S272K; A001G-I030V-T078D-V093T-T003E-S156N-S159D-G166S-S194P-F217R-A236N; A001T-N076D-T078S-T079I-Y086P-D089E-S097G-T103S-L104V-G106S-I111L-S114A-I115G-S116N-N I120H-I122A-M124L-G128S-S129P-G131P-T133A-A134T-Q136E-C139V-N141S-Y143T-N144S-I147V-V148L-I150V-S158T-G166D-E248N; S052A-N076D-T078S-T079I-Y086P-D089E-S097G-T103S-L104V-G106-I111L-S114A-I115G-S116N-N120H-I122A-M124L-G128S-S129P-G131P-T133V-A134T-Q136E-C139V-N141S-Y143T-N144S-I147V-V148L-I150Y-S158T-G166D-F217L-E248N; A001T-N076D-T078S-T079I-Y086P-D089E-S097G-T103S-L104V-G106S-I111L-S114A-I115G-S116N-N120H-I122A-M124L-G128S-S129P-G131P-T133V-A134T-Q136E-C139V-N141S-Y143T-N144S-I147V-V148L-I150V-S158T-G166D-T209Y-N212S-N213T-S216T-F217L-A224T-E248N-K251S-N252S-N256Y; N076D-T078S-T079I-Y086P-D089E-S097G-T103S-L104V-G106S-I111L-S114A-I115G-S116N-N120H-I122A-M124L-G128S-S129P-G131P-T133A-A134T-Q136E-C139V-N141S-Y143T-N144S-I147V-V148L-I150Y-S158T-G166D-T209Y-N212S-N213T-S216T-F217L-A224T-E248N; N076D-T078S-T079I-Y086P-N087S-A088V-D089S-S097G-T103S-L104V-G106S-I111L-S114A-I150G-S116N-N120H-I122A-M124L-G128S-S129P-G131P-T133A-A134T-Q136E-C139V-N141S-Y143T-N144S-I147V-V148L-I104V-S158T-G166D-F217L-E248N; A001T-N076D-T078S-T079I-Y086P-D089E-S097G-T103S-L 104V-G106S-I111L-S114A-I115G-S116N-N120H-I122A-M124L-G128S-S129P-G131P-T133A-A134T-Q136E-C139V-N141S-Y143T-N144S-I147V-V148L-I150Y-S158T-G166D-T209Y-N212S-N213T-S216T-F217L-A224T-E248N; A001T-N076D-T078S-T079I-Y086P-N087S-A08V-D089S-S097G-T103S-L104V-G106S-I111L-S114A-I115G-S116N-N120H-I122A-M124L-G128S-S129P-G131P-T133A-A134T-Q136E-C139V-N141S-Y143T-N144S-I147V-V148L-I110S-S158T-G166D-T209Y-N212S-N213T-S216T-F217L-E248N; S052A-N076D-T078S-T079I-Y086P-A088V-D089S-S097G-T103S-L104V-G106S-I111L-S114A-I115G-S116N-N120H-I122A-M124L-G128S-S129P-G131P-T133A-A134T-Q136E-C139V-N141S-Y143T-N144S-I147V-Y148L-I150V-S158T-G166D-F217L-A224T-E248N; S052A-N076D-Y086P-N087S-A088V-D089S-S097G-T103S-L104V-G106S-I111L-S114A-I115G-S116N-N120H-I122A-M124L-G128S-S129P-G131P-T133A-A134T-Q136E-C139V-N141S-Y143T-N144S-I147V-V148L-I110Y-S158T-G166D-T209Y-N212S-N213T-S216T-F217L-A224T-E248N; A001T-N076D-T078S-T079I-Y086P-D089E-S097G-T103S-L104V-G106S-I111L-S114A-I115G-S116N-N120H-I122A-M124L-G128S-S129P-G131P-T133A-A134T-Q136E-C139V-N141S-Y143T-N144S-I147V-V148L-I150V-S158T-G166D-T209Y-N212S-N213T-S216T-F217L-E248N; A001T-S052A-N076D-Y086P-N087S-A088V-D089S-S097G-T103S-L104V-G106S-I111L-S114A-I115G-S116N-N120H-I122A-M124L-G128S-S129P-G131P-T133A-A134T-Q136E-C139V-N141S-Y143T-N144S-I147V-V148L-I150V-A153S-S158T-G166D-T209Y-N212S-N213T-S216T-F217L-A224T-E248N; A001T-N076D-Y086P-N087S-A088V-D089S-S097G-T103S-L104V-G106S-I111L-S114A-I115G-S116N-N120H-I122A-M124L-G128S-S129P-G131P-T133A-A134T-Q136E-C139V-N141S-Y143T-N144S-I147V-V148L-I150V-A153S-S158T-G166D-T209Y-N212S-N213T-S216T-F217L-A224T-E248N; A001T-N076D-Y086P-N087S-A088V-D089S-S097G-T103S-L104V-G106S-I111L-S114A-I115G-S116N-N120H-I122A-M124L-G128S-S129P-G131P-T133A-A134T-Q136E-C139V-N141S-Y143T-N144S-I147V-V148L-I150V-S158T-G166D-T209Y-N212S-N213T-S216T-F217L-A224T-E248N-Q275H; A001T-N076D-T078S-T079I-Y086P-N087S-A088V-D089S-S097G-T103S-L104V-G106S-I111L-S114A-I115G-S116N-N120H-I122A-M124L-G128S-S129P-G131P-T133A-A134T-Q136E-C139V-N141S-Y143T-N144S-I147V-V148L-I150V-S158T-G166D-T209Y-N212S-N213T-S216T-F217L-A224T-E248N; N076D-G118R-G128D-S129R-S130I-G166D-E248N; N076D-G118R-G128D-S129F-S130Y-G166D-E248N; N076D-G118R-G128V-S129M-S130H-G166D-E248N; S052T-N076D-G118R-G128M-S129V-S130F-G166H-Y238F; S052T-N076D-G118R-G128D-S129R-S130I-G166D-F217R-N256R; S052T-N076D-G118R-G128V-S129M-S130H-G166D-E248N-N256E-S272K; S052F-G053Y-N076D-G118R-G128D-S129F-S130Y-G166D-F217R-E248N-N256R-S272K; and A001G-A040D-A048Q-S052T-G053E-Y091H-S114T-I147A-S156N-S159N-G166H-S182E-Y238F; wherein the amino acid positions of the variant or recombinant polypeptide or active fragment thereof are numbered by correspondence with the amino acid sequence of SEQ ID NO: 10.

10. A protease variant, or a recombinant polypeptide or an active fragment thereof comprising an amino acid sequence comprising one or more deletions at one or more positions selected from 53, 55, 56, 57, and 58 or G053, P055, N056, A057 and L058; wherein the amino acid positions of the variant or recombinant polypeptide or active fragment thereof are numbered by correspondence with the amino acid sequence of SEQ ID NO:10.

11. The protease variant, or a recombinant polypeptide or an active fragment thereof of any one of claims 1-9, wherein said variant or recombinant polypeptide or active fragment thereof further comprises an EPNALQDGNGHGTH (SEQ ID NO:44) motif.

12. The protease variant, or recombinant polypeptide or active fragment thereof of claim 11, wherein said motif extends from residue E54 to H67, wherein the amino acid positions are numbered by correspondence with the amino acid sequence of SEQ ID NO:10.

13. The protease variant, or recombinant polypeptide or active fragment thereof of claim 11 or 12, with the proviso that the variant or recombinant polypeptide or active fragment thereof does not comprise WP_047970940, WP_010192403, KPB_03414, BAD11988, BAD21128, Bhon03321, DSM9712_SprC, DSM6951_SprC, or DSM9711_SprC.

14. The protease variant, or recombinant polypeptide or active fragment thereof of any one of claims 1-12, wherein said variant or recombinant polypeptide or active fragment thereof further comprises an amino acid sequence having at least 75% amino acid sequence identity to SEQ ID NO: 10.

15. The protease variant, or recombinant polypeptide or active fragment thereof of claim 14, with the proviso that the variant or recombinant polypeptide or active fragment thereof does not comprise WP_047970940, WP_010192403, KPB_03414, BAD11988, BAD21128, Bhon03321, DSM9712_SprC, DSM6951_SprC, or DSM9711_SprC.

16. The protease variant, or recombinant polypeptide or active fragment thereof of any preceding claim, wherein said protease variant, or recombinant polypeptide or active fragment thereof has protease activity in the presence of a surfactant, cleaning activity in a detergent composition, or a combination thereof.

17. The protease variant, or recombinant polypeptide or active fragment thereof of claim 16, wherein the detergent composition is an automatic dish washing detergent or a laundry detergent and/or the cleaning activity comprises hydrolysis of a substrate on a protein stain.

18. The protease variant, or recombinant polypeptide or active fragment thereof of any preceding claim, wherein said protease variant, or recombinant polypeptide or active fragment thereof has one or more improved property selected from improved cleaning performance, improved stability, and improved residual protease activity when compared to SEQ ID NO: 10 and/or 48.

19. The protease variant, or recombinant polypeptide or active fragment thereof of claim 18, wherein said improved property is
(i) improved residual protease activity and said protease variant, or recombinant polypeptide or active fragment thereof has 15-100%, 20-100%, 25-100%, 30-100%, 35-100%, or 40-100% residual protease activity when measured in accordance with the Stability Assay of Example 1;
(ii) improved cleaning performance and said protease variant, or recombinant polypeptide or active fragment thereof has a BMI cleaning PI of ≥0.7 in comparison to SEQ ID NO:48 when measured in accordance with the Cleaning Performance in Detergent assay of Example 1;
(iii) improved stability and said protease variant, or recombinant polypeptide or active fragment thereof has a stability PI≥1.01 or 1.1 or 1.2 in comparison to SEQ ID NO:10 when measured in accordance with the Stability Assay of Example 1; and/or
(iv) improved cleaning performance and said protease variant, or recombinant polypeptide or active fragment thereof has a cleaning PI≥1.01 or 1.1 or 1.2 in comparison to SEQ ID NO:10 when measured in accordance with the Cleaning Performance in Detergent Assay of Example 1.

20. The protease variant, or recombinant polypeptide or active fragment thereof of any preceding claim, wherein said protease variant, or recombinant polypeptide or active fragment thereof is derived from a reference polypeptide selected from SEQ ID NOs:10, 18, 19, 45, 46, 57, 58, and 66.

21. The protease variant, or recombinant polypeptide or active fragment thereof of claim 20, wherein the reference polypeptide is SEQ ID NO: 10 and said protease variant, or recombinant polypeptide or active fragment thereof has one or more substitutions in one or more molecular segments selected from Segment 1 comprising positions 76-79 and 86, Segment 2 comprising positions 97-148, Segment 3 comprising positions 150-170, and Segment 4 comprising positions 207-220.

22. An LG12-Clade of proteases comprising a protease variant or a recombinant polypeptide or an active fragment thereof of any one of claims 1-9 and 11-21.

23. A cleaning composition comprising the protease variant, or recombinant polypeptide or active fragment thereof of any one of claims 1-21.

24. The cleaning composition of claim 23, wherein said composition further comprises a surfactant; at least one calcium ion and/or zinc ion; at least one stabilizer; from about 0.001% to about 1.0 weight % of said recombinant polypeptide; at least one bleaching agent; at least one adjunct ingredient; one or more additional enzymes or enzyme derivatives selected from the group consisting of acyl transferases, alpha-amylases, beta-amylases, alpha-galactosidases, arabinosidases, aryl esterases, beta-galactosidases, carrageenases, catalases, cellobiohydrolases, cellulases, chondroitinases, cutinases, endo-beta-1, 4-glucanases, endo-beta-mannanases, esterases, exo-mannanases, galactanases, glucoamylases, hemicellulases, hyaluronidases, keratinases, laccases, lactases, ligninases, lipases, lipoxygenases, mannanases, oxidases, pectate lyases, pectin acetyl esterases, pectinases, pentosanases, peroxidases, phenoloxidases, phosphatases, phospholipases, phytases, polygalacturonases, proteases, pullulanases, reductases, rhamnogalacturonases, beta-glucanases, tannases, transglutaminases, xylan acetyl-esterases, xylanases, xyloglucanases, xylosidases, metalloproteases, additional serine proteases, or a combination thereof.

25. The cleaning composition of claim 23 or 24, wherein said composition contains phosphate, is phosphate-free, contains borate, is boron-free, or combinations thereof.

26. A method of cleaning comprising contacting a surface or an item in need of cleaning with the protease variant, or recombinant polypeptide or active fragment thereof of any one of claims 1-21 or the cleaning composition of any one of claims 23-25; and optionally further comprising the step of rinsing said surface or item after contacting said surface or item with said variant or composition.

27. A polynucleotide comprising a nucleic acid sequence that encodes the protease variant, or recombinant polypeptide or active fragment thereof of any one of claims 1-21.
